United States Patent Application Publication US 2016/0251675 A1 - sequence listing, part 2

SEQ ID NO: 62 - DNA, 1802008 bp, Oryza sativa
ctgctacgctgctactcctagctgctaccaccaagcgcgagctctctctctctctctctctctctctctctctctctctctctctctctctctctgcatgtaccagtgtacatgaacgatgcagcagcaggacgcaagtcacgcaacaactccgatcctacgtacacacatgcatgtacgctacactcgcatatactaaggccgtgcttagttgtcttggcaaaaaaaaaaattgacgcataccaatacacatttaaaatattaaatgtaaaccaataacaaaacaaattacagattccgcctgtaaactacgagacaaatttattaagtctaattaatccgtcattagtaaatgtttactgtagcactacattgtcaaatcatggtgtaattaggattaaaagattcgtctcgcaatttacatgcaaactgtgtaattggttttttcatctatatttaatgctctatgcatgtgtctaaatatttgatgtgatggaaaagttgaaagtttgaagggaacactacctacgacgaggacttctgcatcgatccattgatcaggatcagagtttgtggtgccttgcgagtggtgagtcgatccattgatcaccatagtttgtggtgccttgtgattggtgaccggttcggtcgctcggccgcgaggagcacggagccggtcgaccataaattggcgcctgcgcgggccgttgggcgtccgaccgatcgatggatggatcagtggccaatgaggcaatgatcacttgatcagccgcggtgatcgacgggcacctaaccgcggggcgagccattgaatgcacggccgcattgaagggtggccatggggatggtggtggcggaggcgcagacgcttaaatggggatccatctgcacgcagtacacatatgcgtggctagctagctagatagacggagtgcaactgcaatgcaatgcagtgcagttcaatgcagatgcaaatgcaagtgtaaagtgactccagcttagctagatctaccggcagatcaactcgaagacttcaattgtgtgccgcagcgcgcatgtaatgtgatacggctactactactccgtagggcgtaggctaacgaaaacctcttgctagcatgcatgtgatgttgctgaccggcgtgtgtacgagtggtaggactctgaatctgagagcataaatagatgctacgcgcctacgctagccatggaggaggaccggagattggagacagtctcggaggggattggtcgccggtcgccggttgggttcgcggcttggcgcgacggtcacttggaccgttgggtagccaactctgcccactgcccacgcagaaccgcaaacaaacagaaacagacatgagttcgggagaaaaaaggaaattaagctcctggcaagattcgtatacgtgcacacatccgccacagatgctaatcagtccgcacggcagcgtccgtatgtacgtagtatacgcgtctgtatttatataaactttatacgtatgcacatagatattgtacgtacacgtataaagtttgtatgcatatatgtatagagtttgtatatatgtataaattttttgtatgtgtccgtatatacgtatatattatttgtgtgtatatattacctctgtgtacatatacgtatacatgtatattttatatgtataagtataaatttttatgtatgtgtacatataacttttttagatgtatataaaaaattttatatacatatgtatatgctttacatacatatgtataaaatttatatatgtatgtaaagtatatacatacgtactccccttctgtttctaaatatttgacaccgttgactttttagcatatgtttgaccgttcgtcttattaaaaaaaattatgaaatatgtaaaactatatgtatacatgaaaatatatttaacaatgaatcaaataataaaaaaaattaataattacttaatttttttaataagacgaatggtcaaacatgtttaaaaaaatcaacaacatcaaatatttttttagaaggaaatatcaaatatttagaaacggagagagtacatactaaggagactagaggaggggatcaccggtcacgagggcgtgccccagtgcgaccagtcgcccattaacaacgtcgaatatctacggtccgcaatggtattacttagttgtcacgtataaacttaccaagattaattgcatatgcttttttaaacaagtactttcatgattacactgccaaccgagccgcgcaagtttctcgtataaattaccttccagggagcatatatgtgttacattataattatattaaagttacaatataattatattataagttatatttcaaagattgtattgaggttttcattgaaagttgtataggtagtcaccactgtattactatctagtacttcctccctccgattacaaaattctttgacatttgaataatgttaggattaaacttttataatttcgactaatcaataaatttaaaaatatttagttaaaatcactagaacaacatatataattttgtcttttaaaatactataataatattatataatagaaaaatatagtctagatatattttgaatatcacgttattatcgttaagaattatgtatccagacgaagtatatcttttaacgataaggttgccctttgtcaatctatctagtcattaggctgctcaggcaagcaaaggactgctttatattattaagatcgatcactttcggctagtttaggggtagacttttttagcttatttgacggccggagccgtgcttattaatagctaccgggatgtttggtgaggctaactcgaatgaaacgctcgcattgtgattgtgtggtgctatggatcacctaccaggcgagcgccgtcgaagccgtgtcaagtgtgcatgcaacaagtaccatccagtatgatcgaagcatatcagcaattcagcatctctgtcaaatcgcacgcgatctctctctctctctgattgtgaggagggaagggagtttattagtactactaacaaacttggactctccatttcctgtgggcaataattaaagagactattattatctggtcgaggtgcttctatgctcacagttgctcacccacctagcacggttttaaaagcacggcactacactaccctttcaagcgtcaaccctttatgacagaccatcggcatcacccggtgctaacacgatatgcagcattttatatcttgtcacctgccgatcgaccatggaaggtggctgctcaagccgctggtgggtgtgcgcccaccccaagatgtttttcctgtgaacttgccagcattcccgtctcaaaataattaataatgataatcattatgatggtgaagaagaagatgaatgaaaaaattatcaacggtttggaatccaactacgatcaatttctatatagggatccgacccatgtaacggtacgcaatactctcagggtttaaaattcttgatattatcagtccgaaggagtattatatggagtatggtcatttgctcaagttagtctataacttgatgtatcctaatggtttgtgttcaccaccgaattccgtgtgttgggtttgaattctggcattgctcccttttttgggtttgaatcttggcgccaatccatttttttctcgccgtccaccgtgcgagcgagaaaaaaaaggcaagtgcacaagctaagttcaaggtgctaagttcgaaccccttgaaaccaaaggattatctggtcaccttgaggtgcgggagtgaggtgataagttcgaacccttgcaagtacacaggctttctcacgcagatttttcccctccacataccagcacgaatctcaaggcaaatccgacggccaaaaaatcgaaattttttctccttgttttctgttaacagaaatctagcaaatccgatagagaattctcactgattatctgtaagtgtgcaggatatctcatatttattaccgataatttctaacagactaaaatgtttgagaaatgataagacaaacagaagcataatatttgattcccagaaaatgaaagcagacttgtaatttatagaaaaatagttgaaaataattttcctaaaggagctttgccttccaaatttaataagaaattacttgaggtgccggatgtggagctcgcttttagtcactgtagctcgcccaacacagtctgatactcccacgttgaaaaaaaaaggaataagttcacttggtgattgaaatctaatctatgactctagatcacaaaaccagatatctcgacccccaaactcttaaaaccggtgcaatttgaatgcctcggcggttttgaaggccggtttcgctgaagtggcgcctacatgttaatattgacctagtcatcgttcaagtggcgtttacgtggcattaaaattttaaaaaatatatatggacccatctgtcaatcacacaaaaaaaaatagtaggacccactaacacgtggggcccacaaccatcctctccttccctttctctccccctttgctgcgctggagcagcgggcggggccggagcggcaacggcggcgtgcgagggccgaaagggagaggggagaggcggagccgccgagcttgtgttgtcgccgccaccgccggtgcctcacctcgcgctcgcgctcgcgccggcgccgtggatgctgtaacgtcccgccttctcaggccgggcctacttacatctagcagcttttataggtcatatgctgctctcacagaccaacacaagtcttttctgcacactttgtcctcactcgtgcgcatttgggaagaatttccaggccaagcatacttaacctcaaagttctttagagatcggcttctggaaaagatcccacctctcccaggctaggcccacttacatctgacagcttttataggtcatagattgcgctcacaaaacaacacaagtcttttctggaagaatttttatgggtcatagactgcgctcacagaccaacacaagtcttttctggaagaattttcaggccaagcacacttaacctcagagttctttagagatcggcttccgaaaaagatcccacctctcccatgtcggggtcaaagactacgctcacagaccaacacaagtcttttttggaagaatttccaggtcaagcacacttaacctcagagaatttctaggccaagcacacttaacctcagagttctttagagatcggcttccggaaaagatcccacctctctcaagccgggaccacttacatctggcagtttttataggcaatagatttccaggccaagcacacttaacctcaaagttctttagagatcggctttcagaaaagatcccacctcccccaggccgggaccacttagatctggcaacttttataggttatagactgcgctcacagaccaacacaagttttttagagatcggcttccggaaaagatcccacctctcccattctttagagatcggcttccggaaaagatcccacctctcccaggctgggcccacttagatctggcagcttttataggtcatagactgcgctcacagacatacacaagttttttctggaagaatttccaggccaatctcttggtttctaaaaaagatcccacctctcccaggcaagcacacttaacctcagagttctttagagatcggcttccggaaaagatcccacctctctcaggccagggccacttacatctggcagcttttataggccatagatttctaggccaagcacacttaacctcaaagttctttagagatcggcttccggaaaagatcccacctctcccattctttagagatcggcttccagaaaagatcccacctctcccaggccggggccacttagatctggcaacttttataggtcatagactgcgctcacagaccaacacaagttttttagagatcggcttccggaaaagatcccacctctcctaggctgggcccacttagatctgacagcttttataggtcataaactgcgctcacagacatacacaagttttttctggaagaatttccaggacaatctcttggcttctaaaaaagatcccacctctcccaggcaagcacacttaacctcagagttctttagagatcggcttccggaaaagatcccacctctctcagaccggggccacttacatctggcagcttttataggctatagatttctaggccaagcacacttaacctcaaagttctttagagatcggcttctggaaaagatcccacctctcccattctttagagatcggcttccagaaaagatcccacctctcccaggccggggccacttagatctggtaacttttataggtcatagactgcgctcacagaccaacacaagttttttaaagattggcttccggaaaagatcccacctcctctcccaggccgggcccacttacatctggcagcttttataggtcatcagaccaacacaattcttcccgatcggtcacccatccctaaattgctacaaaccgagcacgcttaacctcagagttatcggcttctggaaaagaagttgcaacttgttggtatgagtattctattaattctattaagccctaagccggaatgtcacaatggcctcagacggggatggcagaggtagccaatgaggggtggcgggcgggcgagatctcggcgatagcgtcagacggcgacggtgcttcggcaggcagcgacggagtagaggagtagctcgacggcggcgagcgggcatgatctcggcagcgccgcctctcctccctctcttccagccctcgcccgccgctgccgccgctcgcgtctcggccctcgtccgctgtcgccgccgctgctccggccctgcccgccactccagcgcaacaaaggggaagaggaaggggagagagagaaagagagaagggaaggagcggatggttgtgagccccatgtgtaagtgggtcccacctttttgtttgtgtgattgacaagtgagttaaattatattttttatattttaatgtcatataaatgccacgtcaaacaccacgttggacgatgacaaggtcaacactgacacgtaggcgccatgttagcgaaaccgcccttcaaaaccgccgagggagtcaaattacaccggttttaagagtttgggggtcgagatatccggtactgtggtttaggtcactgattagatttcgatcacttttaagggccaccaagtgaacttattccaaaaaaaaaaacctggtgaaatggcctttgctgggccgagcatgagccaggcccacagtgctgaagtggcggccttgtttcacatggtgggctgtcatcaaatgtacaattcactaggacgccacacgaccttttcaccggtcggcgcctttccacattcctggctcttctacatcccgcttttcatcccaaagtaaaattcgcatatgtgaatatgtgagttcatcctagatacatatgcacccgttttgcaggctgtctttgcgatgtgctttccctccccttgacaatgattcctaagcaacaggagtgtgccagaaggattccaaaaccaaagctccatccaaagcgctctgccgctcgctcgagaggttcctacaaaccaaaagaccacacgagatgggacacgacgaacgcttagccgtgcaaaggaaagaggcaaagcgatcgtctcactgtctcaccgatcgagctagctctcgtcggcaacaacacgtaccaaaaccgccgcctactccaaccacagcctgtgtgacagcccgtggaacctcctctcgctactcaaagtatcgtccagttgttgctatatatatagagacgctacgatgtaaacttaatcacaaactcctgggttaagctcgatcgatctggttccctgtagtgaccaagctagcgatagtttactctgtgtgtgtgtggaagaatggcgcgtcaggggagcacgacgcggcggccgcggccaacgacgtcgaagtgcatcgcggcggcgctgctggcgattgtcgtcttgctggtgatcatcgtcatcctgtggctgacggtccgcccggcgaagccgctgctcgtctacgtcgaccacgccgcggtgaccgggttcaacttcacgtccggcggcagcctcaacggcaccttcgacatcaccctgcgcgcatacaaccagaacaagcgcgccgccgtgtggtacaagtcggtcgaggtcggggtgtggtacggcggcacgtacctcgccggcgccgtggcgcccgggttcgacctgccgccgctgaacgtgaagaggatcgacgtggccgcgcccgccgtgagggcggcgctgccgcggggcgtggaggcgaccgtgaagaaggacaggtccgacgggaagctgccggtggacgtgcacatcaagggcaaggtgcggttccggtacggcttggtgaggacacggcgctacaagttgcgcgcgagctgctcgccggtggtcgtcgacttctcgtcgccgagctcgttcgatcgggtgaactgccacgtccatatctgagtgcgcgccggcggcgcgttcacgactgaatgcatggcaaattgtacacatcttgcgtgttttctctctgctttgaggatttgtttgtgtttggattgattcggttgttaaatactggtttgtgacatttcttcacttgtattattcatttttttaatattttttcttcggtgtgtacatgcgtatttctccagcatctaatttgtgggaggaaaggttcatgaaatgtcaagcgctgatgagtgatagaaaacggcacgggagacggcagcccaaacggggtgtgcgagaccgtgataattttcggctcatctgtgccgcacatgccggatcgaacggccggcagatatcccaatgggagtcggatttttattcaccgaacccccgccgcatgcttcgccacagggccggagcgcccatacatcgtggctgacccctgcttcggcccctcgacgccctcgtctctaggctccggcatacgcacttaacatccacagtgacaccgccacgttggcgtaccgcgtacaggaagaagcaccctggcttgaggtcgagagtagttctggtctccatgacggaatcagaggtgcgctgtgtcctgtgtgcagagtagcgcaggcgcatcggcgtggttaaggtgttgttcgtgcggctaacggactacgcggtctttgattgtggattattttttccgctcatccggttcgtacatgcctaatcggacggctataaaagatccagagagtcggtgtttaagattctgaaccccagagaacgctaccgatcctcgatcatgccgtgcctcaccggagcgtcgccacatagttgtcatcctcggcgccctctcgctgcttcctcttgtttttgttttatgctaagtagtactcttcatatgtttgtaggtaacaaactcatcgatttttttcttttaaactatttatacaatctatgattaattgtacattaaattcgttaaaattaaaattttacaataagagcacacatggttatcctccactgaaaaatatttgatatttaattgaatttttaatgttgcacatggtattcttaatgtttcagtaaatattttataaggttttaactagtacaacttattgtttcatacatatataaaaacacttcaacaacattaagtatttgcaaatataacatatttttcgtatgtcttttttgtttcactcgttagaacttattgtctcatataattggttgttgatgctccagttagcagttttaaatgttgtatttatgcagtggagtgaaacaatgttcttaatggagtgaaacaacgttcattttttttggtaaggtcttgtggtaaagattaaatgatataattaaatcataaatcagaaaattattttaatagaaaaatcgtttaaaagataagtgaaaggagaaggagtagccgcgagagagagagggagggaattagcgcgtgcataaaagtatatcaggcggcaggaaccacgcatagtagtttggggccctatatttataaaccacgcatagtagttcggggcgccatatttgtagtacatcgcatttgttccacactatgaaatgttttttcaacgccctcattgcggatcattcattagcaactagcctgttgagtcgcacgtttgtgcgaatataacctctctgtctattagatgtgcttatatgttgtttgtgttaatgagcctaaatgttttaataataattaaaaacaaatacatttttaacacattttgaagtatagctataacactaacagatatctatatctttgatttgtgattaagaatattattttaaaaaataatttatcatatgttaccgtgaccattacctccttcaatttctaaatttaataatgtaaatactcacatcttctacacattgcaattctgtcatgaccagttgagaagtatatatacaatttttaacgtaaatcttataagactgttcagattgtagccaaaataaatcttaccaaattttttcaatgccaaaattcaggcaatatggcaatattgtcaaaattttgacaggatttttttatttatttaccaaatttggcaacaaactaaacgcgaacatttttttggaaactttaaaaaaaattgtatggttgaaaatgacatcaatctaaagtatgaactgctccaatggaatgtcttccatgcaacatgatttgtaattttaaggcataatgaaataatcgatagcaccaggttaattagctattcatctatacattaatactcgttattttttatgcaatagaacttctatgaatattcattggtgatttttttgtcaatgtacttttttttcattctcatatctttcttaccacatactccctccatactcataaagaaagtcgtttagaacagtgacacggtgtacaaaatacaactttaacttcttgtttctataaaaatatttattgaaaagtgatatatgtatacttttatgaaagtatttttcaagacaaatctatacatataatttttacatttttaaactcaacaacttgagagttattcatgatttatattcccaagttttgacttaaacattgtcctttatgagtatggaggaagtatctcatgggtattgcatgaaggttctagaacaacaataatattgtttgctactcactccgttccaaaatataataacttctctatcaacattctcttctcaaccaatcacaaccctccaccattcacttttcccacctacctctaatattcatccaatcacaatcctccaccattcacttctacctactatcttaataactgtgtctaactccaaccgaattgttgtatcgaagggttaatatttgtttgatgatgtggctcatcctgatggcattttggaattctcttttcacttatgcagatatctcaaagggaacgtggttaaggggttcgccagtcatgacaaaaactcaactataaacaaatcacaagttggcaaaattttcctattggcagctacatgtagatggcagcttggatgagattatcatgtaaaaaaaacccaaagctggcctatcatcgcatcacatggtcataacaagtaccccttgttagatcagccaatcaacctcacggcaaaagtgtccaacactccaaatcctcgtctcgctctcaccaaagtcagaatcaccttccccaaacacgtctcacatgtccttaaaataatactcctcccatccaacggttcagattgcgagtcacagtctcagagagcgaggatccaacggcggccgagcactaacggaatctttcctcgctgtcgaaggcagtgggccccggtgaacagtggcacgcagtgcaaccaaccaagcgacgagatcccatatcctctcgagctctcctcctcatcgagcaaagcaaccaagaacttctccttcccctgcttcccccaccggccatggccatgtccatggcgatgtcgagagctctcgccgcgcggcatcgaagccatttgggccaccgaattgaggtgaagagccaccatgcgtccccgccgcggcttcctcttcttcctcggagtcccgggctcacgctcgcgtcgcgcccgcggatgctaccggcgaggcccaggatgtcgtcgagtgagtcggacctgtcgccgacgccgccgtcggagcgcaccatgacggcctgggacctagccagcctctgggtcggccttgtggtcggcgtgccgtcctactacctcgccggcagcctcgtcgacctcggcatgtcggcgctgcagggcgtcgcgaccgtcgcgttcgccaacctggtggtgctcgtctcgctcgtgctcacggccgcgccggcggtcacgcacgggctgccgttcccggtgctcgcgcgagcggcgttcggggtgcgcggcgcgcacttgccggcggtcatccgcgcgctcgtcggctgcgggtggttcggcatcgagtcctggatcggtggccgcgccgtgttcctcctcctgccgtccaggctcaagtcgtaccagccgctgctcgcgccggtgccaggcctcggtgcagcgccgctggagttcgcgtgcttcctcgcgttctgggccgcgcagctcggcgtcatcatgcacgggatggagggcatccgcaagctcgagaagtactcggcgccggtgctcatcgtgctcacctccgcgctgctggcctgggcctacgtgtccgccggcggcttcgggcgcatcctctcgctgccgccgaggctgacgcgcgccgagttctggaaggtgttcttcccgtcgctcaccgcgaacatcagcttctgggcgacggtggccatcaacataccggacttcgcgcggtacgcgcggagccaggcggaccaggtgctcggccaggccgggctgccggtgttcatgggcatgttcaccttcgccggcctcgccgtgacgtccgccaccgaggccatcttcggccacgtcatctccgaccccatcgagctcctcggccgcatcggcgggccggtgacgacggtgctcgccatcgtcggcatcagcctcgcgaccatcacgaccaacattgccgccaacgtggtggcgccggcgaacgcgctcgtcagcatgagcccgcgcaagttcacgttcgccaagggggcgctggtcaccgcgttgctcggcatcgccttccagccatggcggctgctcagctccagcgagagcttcgtctacacatggctgctcggctactcggctctcatgggcccgatcggagggatcatcctcgccgaccactacatcgtccggcgaaccgcgctggacgtcgacgcgctctactcggaggacagccacgggccttactatttccagggcggtttcaacgtcgccgccatggcggcgatggcggccggagttgcgccgatcgtgccgggattcctgcacaatgttggagttctaccgagcgtctccaaggcatttgagacagcctacaacaacgcttggttcgtcagttttttcgtcgccggcgccgtctactgcctgctctgtcgccggaataggaatgaactgaaacaccagcacgattgattgtaatttgcaaacacaaaggagtaaaaaatgttgcaaatgatagttgaaagcaacatcagcaaatgcttggaaaacaactgtgtttgcaagaggggaaagtttccaacactcccatctcattttctcaaacggctgaacgatgcgttttttgcaaaaagtttctatacgaaagttgtttaaaaaaatcatattgatccatttttttttaaaaaaaactaatacttaattaattacgcgttaatggaatactccgtttttcatgtgcactgttcaggttaccattctcccctagcgaacacagccatatgactctagaaaattctcatatgccatatctcattgttgggaaatgctaacccaaaagagagctgctcattgataatgctggtatcgataagttaagaggattagttcaaatttgtgctactactaagctgctggggcaaatgatcgaataattcatgaaacaattctgcccgacagcttacatttcagttggacagccatgtaaagcaaacctacccttcaaacaataatacacatgagccatcaacgagccccgatacactacatgtgccatcaacgagtcctggttttgataatcttccccctagatgccttcttctccatcttctcccttttctttcgggtcttctcatcctcttcttcgccctgcagacaggaggtacaatactgataagtcatatccaaatgtcggttgtgataataatgtactgccactgacaatcactctatttttacctctgaactaccaccgaaaaatgctcctctcaacagaccggaaatcttgtatccaccataagctggaatctgaaaatcaataggtatgtggttaataacaagttaacaatgattggcaatgcctcttggtattgtgcacaactcatcatatgtagctaccatctgcaatgcgcattgagaattttatttaacaacaaaaagagggggccatagttagatgcctgtataacaaaaataaatcgaaacaataattttctagagattttaactcattggccatgatgccatgtgcctacattcctaacatgcctgtgattgcgaggaaaaactgattgaaagtaagagcacaacagcttacagtagtagcaatcagtgacggtaatctaaattggtactgcagtgtggctgttattcaaatataccgctgtaaaaccaccttatgaaccagtggtcacaaaataagttacaagcatagatcagacggtcatggtatcatggataacattcctaggccattggcataattaggttgaatgataatatcaagttcagcacagaatcttcaccagacatgctggaacatcaatcaaataatggaaacatacaaacataggataaagaaagaggatgaggacaagaatttaaatagttttcaaccaagttttcatgttgtaacatgctacagaacaagcaggtttatgtagtttataaatattgactttattctatattgggggcatcccaaacaggggtgacaccaatagtgacatcaacaaaaagtaatcgccatagtaaacagaaatataattgaagtcaagaatggtgtgtgtgaatcttaccaccaaatatgtccaccaaaatttatcagaaaaaatagacatcagctgcacaaagagagtgatatatatcacatcttgtaaatatctgcatgaaaagaagcaaatgacgatttattattcaattatacagcagaaggcatacgaagttttgcatgtacaagttgatgtattccatcaatggatgatgtcaaaattctaaaagtttcaacccactgtgatggtcaaagctctctaattttagttaggagtattcatgtaatttcagctttaaaatttggtaactgattttaaagaagctggatcaaggtctttgtggcgaattttacaaggtccacaactgaaagttaataattttccatggaaaatatccaataattcattttcaagtagaataattaaaaacaattgtgttttccttactcggacattccaccagcgttcaagtcataaccagcattaattaactctccattctcagagtattctggctctgacatattggcaagttgcttgtacggcagaaaatatgcagcagatgtcacagcaagaccaatccaatgcttccaggtgaaagacgaatgcattacagccattctcactactatgtaaataacctgcgcaacaaattaagttatacaagaaatcaggtactagactccgaactcaaaatagctaaagtatataattaggttgtgatataactgattttacggtccttgagaaggtagcaagaggtaccacagtttttagtattaatttgtggtacctcatcaagagataccaaaatttacattaacaaactgtggtacctcctcaagaacagccaacaggtaaaaattaaaaaggaatcccatatggcatacttccaagaaaagaatgaaagcaaagaagaaatgctaccatagcatgctttttatatactggcatttttaggagaaatattaataattgccaaagctatatagtgtttaagataataggttataaaactaaatttgagatccagaatagacccaccaatatccaaattccaaccttacaaaccaaaaccccccacaggaatattggatatgagatgatttcatcttcttttctttctctaatttattcgattgcattagcaactttcgcagatgcagtaggctagaagccagtgaaagatgccctgagatactcctggtaagtgatactcctaatttctttctggtttaagtacgacacaaagggcataaaattcaagtgattattactccggtagtcaagaataaagagcataagtttgatcttatcagagtgaggacttggggtttagtgatctttataaccttctaattaccctaaatttacttcaatttttatgaaaagaagtaccaaagagaaccatgtatacataaccttgttgaacaaaataaaatgcatcaatgcaatgcatggaggcaagatggcaccaagcacctaatcgccgccaaggcaagattataacctttctatcatgaacttttgtgatcataaattttcccatgatatgaccaaaacatgacatgttccacaaacaaacttagaatccatcacagaacatgttgaggtcagaagggaaggtgattctacaagacaaaactacgctagagctttcctccctctcactgagtaccttgacatgcaagactcaaaccttcccaaaaaaataataaataaataaaagaagaagactgaacacgataactaccatagcccagacaactactccagggaccaggcaagatcagctagtccaattcaattcttcaccaaaattaccacccccaaactcatgtatcacacgaccactgccaaaaataaaatctaaccaaaaaccaaccatctagcagcgtcctaagcaattcacggatctgaaaacagaagggggggagggaatcgacggggaccgctcacgttggccgcgaggattaggcgcaggatgaggtccatccgcttcttgttcgcgtccctcgtcttcttcaccccttgcttcgccatggctggctgcagcgctcggaatcctcctctcctccctcgctgggtctccctccccctcgtctcctcctccgctgagatcttattgcctcgctccaaattcactctccgatactgattcttcctccccaatggttctagaactggacctctaaatgggccttgactgagagcttgtgggcctagactttcccggcctctgaggcccattagatcggcaccgcgacggcctcacctataaaacgtccagcgcgccaccgccatcgccatcgctacggctagcaactgcctcgcctccgatcaaaccaacgaattgctctgtgcagagggggagagagagagagagagagagagagagagagagagagagagagagagagagaggggggatggagagccaggagctctgggcgctgtacgtgggcgtggcgtcgctggccatcgggatgctcggggtgctgggcgtctggctctgctacctgttccaggccgtggcgcgggggccgcctccggacccgccgccgccgccgacgccgccctgcacgccggagacggaggaggacgacaagaacgggctctcggaggaggagctgaggatgctgggcgggatctgcgtggcggtggccggggatggcgaggaagaggaggaggagcagctctgcccgatctgcctcgacggcatggaggccgggcgcgccgtgcgcgtcctccccggatgcagccgcgcctttcaccaggactgcgtcgaccggtggctcaccatctcgccgcgctgccccgtctgcaacgcctgggtcaccacgcagtcgccggggacctcgccgccgcgcaccaagcctgctctgaattcttgagatggcagcgtcgccgccctcccgatcatgggtcagttcttggttcttgacgagttcttgatgagttctcgtcgatcgtcatcgtcagtttctaggctctggagagcggttcttggcgatttcttgttggctatcttgtgtttttttttggaggattcggggctgcgtgtaaattgccttggtgctctaattgttggtagaaatcagtaggcttatgcaggtttcagccctttcctactctgacaggtcaacaattttgcccggatttattctaggtgatgaatgaatggaatagctaatactgtgaatagaccaaacttgttgttgataacacattcatgtttttcagaagacatttttccaatttagatgacaatctttatgttgctttgagatatctttgacgaatatccaaggcctgcagctgtaaaattttacatccttgtgtgggggaaatccagatttggcttttgaactgttgaatcctgaagtcctgatgctagtaaatctgggttcagttctgttgttgtgctgtacttgtgaatttctgggttatgttacctgatgctgcttgaagtcaagttctgatgtactacttatgtgtttctgggtcagttccttgaggttaacttgttgctatgaatctctgctgaaacgatccaaagtttcatctttcttccttttttgtcaaatgtttatgattttgtcagtaccggaagagctttagggattgaagcttaaaattttagacacagcagcagatctgtttctgccctttacgtattgtagtattagttatttcctctttcttaaagtagcaccatttaatagctcgttctatgttgacaaaaagtttgatggaagaatggttacatgggcgtaataagcaggcagactttcttgattgttagttcttcgtcgatactagaaatttcagtgatcaaaagaagtaatttcaatggcatcaattctgttcgtaatttcacatgaaaggatagtacaattgaaaaccaattagctcaaaactggaaaaaccttcagtcctgttctatgttaagtgtgagaaaaaaaatacagaactatcctcgactttacatcccttgataagaaagttacagaaaacaattaaccaaaatatcttggtgtggaaaccagctgacttctagaaaaggtccatgatctgtagttctgagccaacctaaccccaatccagccccaaatattgtacaggttccgcagatgaaactagagaacaacaaatgtcttgccctttgtaaagggtaaagtgtgttatataactacatggatccatgagagaattgaatacaacagtagattcccacatgaaactcaagttaactatttcctgtcatgtcaagcatctcatcaagaccttttaatcgttgcagaccttcactgatcaagaacttaatcttctgtttatcgtcacaacggcgatttttttcaatctcagctcttacagtttgcctcaactcatctggacaaagaacattcaagaatatttagttgtaacttcaagagtaaacattagacagaaaagataggaaagcgaggtttaaaaatgtctgaccgcgtgcatgcacaggagctcggcgagtcatgcgcaaggcctgcctataaagctttaaaacacgtgcacgcaggatgaaagcccttaagtccatgaaatgggccatcgaatgacactctaatagaaccttagcaaaatatgatcatgccatgcaaactgtcccgtaaccctggaaattcaggagaaaaggttgcatgatgtacaattctgtgagacctaccggtggggcatgggggttcagctgaacccccaaacgttttgggggagaaatatgctacctctccctccctctcctttaatttttgaccacacacagcgcctccctgttaagacacaccattaaaaaaagtagaagctcttggatcaaaggaaaagggataatgaccattagatatatgaattgcaactgcctttgttgaggaagtttgctacgtgattaactgtcaaggcaaagcagccaaaccaacactgttgtccgtaaaaaggtaaagaagccaaaacaacagtgttgtccggaaaaaaattgaagcaaaatatgttgcgactcttgccaattgtcagtaattaaccacaacagtttgacaagccgtttgcagtgcatataaagaacacgttaatttcctctaaaaccctcctcataatctccttttctttctgtacagcaaaagcacttccaaggtacacataaaaaccttccaaggcttagtcatactaccaaaaacgttcaagaaaaaaacatcagaaccatgagttaacgttgagatcaatttcaggggcggagacagcttgaagccacaccagggcttagttctattaccttgtcctagctctctataaattcaagcattctttctaaaattaatatggaatttgcatggggtttggatcccagaactagggcttgagctctagctgccctaggcctggatccatgctgatcaatggtgagagtaataaaattcagttgcaaagatgccatgcttcaaaaattccattttgctgatgatatctcatccatcaatggtcatatgcttccattgataggtaaaagatctattgtgatattgtacgtcgatagtaaaatttagttactgtacccgcatcctcattttaccatgaacataaatatgcataatcacaaacaaacccacaacatcgtgtggggtactcttagtcagtaataaggttgttggggcttgtgttttgtggcttactaggaatggctttgttttccaaatcattgtgttaaaatcaccctagacaatcttgtataaaatgattgcgcagattcagagatggatggtcctgtaaaatgaataggagcacagtatgctgcaggtgtggtgtgatcgaattatggagcataatattcaagtgctgaagtctcctgacgtgctgccaatggagattgatggatagctgaatgtctgaagtttagctatgagaactgtaatcctgtcactttctgttttgagtgtttttggaggtgtttgaggtggtgtttggatcgagggacttaactttagtctctatatttagacactaatttagagtattaaatatagactacttacgaaactaattacataaataaaagctaatttccgagataatttttttaagcctaattaatccataattagagaatgtttactgtagcatcacataagctaatcatggattaattaggctcaatagatttgtctcgcgaattagtccaagattatggatgggttttattaatagtctacgtttaatatttataattagtttccaaacatccgatgtgatagggacttaacagttttagtctcatctaaacagggtctgatgtcgttgcctatggccctgatgttacttctgaaacttgcaacccagtagtctgtttgtggtgtctagtgtcgttggtaggaatctgttttttttcttttcgttggatgatgaactacagtaagtttctttggctttcttacaaaagtcggatcaaatatgttctatcttctaaaaaaaaagttagtactaaggttaagacaaagaaaaacctaagcttctagatctagaagagaaagataaggtaagggcaaagagaaaatgtgaaggtagtaatggatgagaaagaaagaggatgtgcttcggcacgggtactcaccggaggcggaagcagcagggcgacggcaccgctgctcgcgcgatgtataagaggtcgacgcaggcggccgacgaactcgcgaggagacgggagtcgaggctgatgtgacgtggagactggcttgcgcgcaaggagtcagaggcgagaatatgcggcggaagccggaagcagcacgacgccggcgccgctactcgcggtgatggagatcggcgcgacggcgtaggcggcgggcgaaggagacggaacgggtgctggaggaggggaggccaggggacagggggctgggtcgcaacgcaaggaggcaagaggcctattacgctgctgggtcagtggggtgttgttacaggtttgggctttttggtggctcggtctccatctgttccatctcctcccaaccccagcccggttgaaacaaaaaaacaactagggtgtgtttggaactttggggagaatactaccaatcgaacgtccgatatatcaaaaaaaacatcggtcggtcaaaatgttgcagctgaccaacaagtgaaacattaatttatatatggtgaaacaaaaaaacagcaactaaaacatttaaaaaatttatgaaacacagtgaagatacacgttgaaacatattgctatcacttatgaaacaataagagttaatagattgaaacatatatttttctttcatcaaaatttaatcgtgtgatattttattataaagatttaattacaacgaatacaacggtgtaatcgaatcatagattggataagtagtttagaagaaaaatcattttaaagaccgataaaatgcatgcatgcaagcattgatggagggtagtagcaattatttttgataattttatgaaacacaataaaaacaggtgctgaaacatatggatataacgtatgaaacatgaagtattaatagtttgaaacttatatttttctttaatcagaatataataatgtgatatcttgttataacgatttaattccaacaaatataatggtgtaatcggattttagatcggataaatagtttaggagaaaaaatcatttgaattttgaagacaaaccccgatacgtctctctcattctaaatgacctttccatgggtctcacaccccatgcacacttggaaacacatgcttgcatgaagcgggttcgatttttctcttttgctcggacgacacatgggaagcaatttccgaactttggataatgggatggtaaaatcttttcccaccttctaaaatggtaatttttaatcttaaccatccattcttcatatctcatctcaaccccccactcatatccctatcccaatctcacccctcttactccattatctaaggctgcaggtaaaatggttgatacctgtcgtcgggcaagcatgagaaggacagaaagttggctgccagtatggattttcagtatgttccgttgttcggtaaggcaaactcaacttgctactttgttgggcttgccttagtgaacgatttggatgattgcatgagagacgtttgctctcgaaggagagcggagttgactctcccgagcaagctatctttttcttgcccctccgggataggttgccaccggaagtgatgattttctttttatggatttgctagatttttgtcgatagaaaatagggagaaagactcttgatttttcggtcgtcggatttgcattaagattcgtgctagcgtgtggagggaaaaattcgtgtgaaaatttacttgtgcacttgcacaggatcaaactcaggacctcgtttccgcaaaccatgctagccacttgagttgccataagattttgaaagatttagacaagttacattacatacattctagttacactgtaattatatttgaaagattttagagaaattttctttcgaaagttctatagtaacttcttttatgattccaaacgactggtcttgtcacgccaggctagcatcaaccgttcaacctagccttggatgacttgaatggcagcctagccaagcccaaactctgtattgtgatggatattgtctgtatagcccagagttttcataacacaagggagagatcacactaagcttccccttttcgggtttgcagcccagctcgtgaggcaaggtcacgctgctgctgtaggatcgtaaatgatctttcccacctcaaaagctagccaatgagggatgggctcccccacttatatattaagtttcttgtccttctataaccaatgtggactattcaataatctccccccttcatatattggtgtccctcagccgttcaccaccccttcaccgtttccttatggtctctcaggtatacgttggtgtccctcggcctttcaccgtccattcactgtttctctacggtccctcaggtatacaggctccacaagcatccacggtccatcatgccttcgcacactttgccactcaggttagagatattgaactaaccagactcagatagcaattgtagaatcgtaaatggtctttcccacctcaaaaattaaccaatgaggtgagagactcccccacttatatactaggtcacttgccctttcacaaccaatataagactattcaatagttgcagcgagctgaatttgtggaaacaaaacggctgttcgtaaattgtgcacaaatttttatgacaccaaattctaccgttattaaaattatgcgtaatcttttacaagacattaccccagccctgtgtgttactagtcgcttttgcataaagtttcagaaagccctaggtcaaaggtgtagcacgaagatctgcagtggttttacctcaggtagttttactccattgtggagaacgttgtcggcgcctcggaggttcaggctgcgaggataaaattttctctttacgtacataaaattttccagttttctaattctcttaacgtacttcagttgcagtattttctcttttaccattggttatgaacatacttcagttgcagtattctgtctcaaatgactacagtatatagattaggacttaggtgtagtgatgattctctaattctctactaatcctattgacctactgcatgtaaactgcaagtctacagcatagggtcgttgaagctacttgcaagggtcgtcaggttaattaacctgtagggggagctttggaagatgcagcagtggcaggttcgtcaaatgtcaacgcgagtaacccttacgctgcccattttacaagtcccaaatgttcttgttcgcagcagtcccgggccatcagctacctctctcgagaaaagcagtacagatctttcgatctcccacacacgcctggttgcataaatctatgcgttttcaacttcacccctcctgggatatcgcaagcacgagggagatctaaccatcagatgaagtttctgaattctacgttttgttttgttgttttgattttctttaccagagcgagatcgctgtgctgcaattgccgtcgtctgtcagcttattagttcagtccaggcattatcgggagcgtgaagcggaagcaatggttagttgttgcagcaagaggatgagcgatgaattatgcatggcttctatgtcaatagaaaagtacaaaaggcaaaagcagattaaatgctgaattattgttcttcccttgccgagcagacagaccggtggttcgtggagtgaccaagcctgaaagttctgtcaaaacaagagggttggtggtttaaacatggaccgttgttgaaaaatagattcagatttcactatcaatcttttatgcatcgtggggtcatgacgggacagcgtccaaatttcgaacatgatgagcaaatatgattcacaggactggccaaatattatgcattaatagctataatcaagaatggctttggtgtatttcagagtggcacccactgcctttcaaggagataaggactaagatgtgctaatccctccaactatacatatgtaaatcattttagtcatactttgtcgtctctgttctgttcctgttatacattttctgaatgcccacgttatcatcagcaaatatctcgcaatctttctcatttccggcatacattagaagagagagtaaataaagcgtggaaatatacaaaattgcatgccaatttaaccttataacttagttcatgtgttcgagaaactaagatcagtatacttgaaaaactggtgaaaataattggtcgtagcttgttgagtaaagaccggattttgttccattataaaaaaaattgaaccagtaaatatgaaaagcattgcaagttttgtctaaatgagactgcaagaatcatgatcttacgttaaaagtttaggccggatgcaaatttacatgagattacaacaaacacgacgtcacggcaaacagctaagctcatctttttatagcccaaaaaaactttatagcttgacgaaaaataattctggagaaaacgacccgtacgtacagcggtaaagggaacagctaatcagctaccacacaacacagaatggcaaagccagctagtggataacagaacaaacaagagaagatctgtttgtttaatgtgacgaccatctggccatgtgcaaatggaatctcagcactgtggttctcgtatgctcacctcctaactaatactttccataattttccatgctcaccacaaaggcaaaagaacaaaaaaagcaggaacagattagttaatgctactagctggagtagtaagcactaagcacggacagtaaactgtcaattcttcaaaattaaccattttacatcagctgcagtggcagtaaaaacttttacagtgccacaaacaaaaaggagaagaaattcagccactcgctgaatcactctcacagtcactcaaacaccatcaggagcagttgcattgcagtccaaacaccacctcccctctcttccatccaaaattttacagtgaaaaaaaaatgcacaaactcattgggggaggattaacggtttaaccctcaacagtaaccgggaacaaatcaagagcgctgtacaagtacatctaccacttagacttagcaggcagtgatcaaaacccaaccttaattagtcaagtgattaaccatcactaacgacgccatctactggtataatattcagtaaacctcttcgggaatgctctgcaggccgggctcccactccccgttcgcctgcatccgccgcgccgcctccgccgccctccgcatgctgcgccgccgcagcgactgcagcctctgctcggcgcctgggccgccggcgccgcccgccgcgcgctgacggtgccgctcccccgcggccgtcaccgccgccgccgccgccaccgccccgccgccgccggtgcccgagccgagcgccgcgaccatgtgcttgagctcgcgcttgctgaccacgatcttgacgcgcactgcgccgccgacgtcctcccgcgacaggacgcgcccgccgtggtgcagctgctcgagcgcctccgcagccgccttggactggtggtggtggtgccggccgccggcctcggcctccctggggaagaagcacctggacgccatctccgcgtcacccgctgcgatcgctcgtcgccgccgccgccgccgcgggcgcgcgcaagcgagtactccgacgtttcttgcaagttacagcacaaaggctaaagcgaaggcaaagtgaatgtgtccgctgccgagtaatgtgacgcaccaacctacttatatactactccggggaccttgagctgatgcatttgccttgccttttggtgagcgcagccacaactgtctccaactccaaccgtgtaccacccccactctccctgacaggtgggccatccatcgactcctaccccaacctgcccccacgctaacaaaaaataaaagtacgtccacttctgtggttaagttcttcttaatgtacatgacaataaaaagggcgaagtttttttaattaacactcaaaaaaacaatcatgagacagggactaatcaagatggcgaagttgaatagagaaatgggcgcctcacatggccgtccctctcgcggagacgggggccgggatcattggatcgatcggaagggaggccctttgcaagtaacgtgttgtcactcctcacgactcgatgactcgtggagtctacgaacatttggttaggatggcacaattgacacagacattgttagctacagcagcgcccctggcatgttctccttactgttttcgccacattgccggtggaacactgtagcactgccattaattcgaccgtcaggtattacgcatatgcagacacgtagtagtattaattatccacgtgatcggttagcatatgttagcgtacataaagttgaactatccggagtatgtatacagagcagaggtaaacagaggaatggaatcggatgaatccgttataatattgagaagaggttttgtcagaaattttcagcatatatcgcagataatattagtgtccttttcagggctctcgagccgaatccttgcgtgtttagatgatgaaacaagtctccccatgacacatagttgtagtgatagaacagtcgagcgaacgtcgttgatacgaatttttaatttaaactgtatacatcaaaaacatctcaaactaactgactagatcatagtcctaagtcctaaccgtcagttaacagacataatcagatcgaactccccccccccccctgcccccaccagaattaggacggcaatgcacatcaagcgttcaactacacttccgttcacccgacgatcatctgatggcgaatttattcgtttttataaacagatcgaggacgcgccatgatcgggcgcaagtagcgtatcaacgtacgcggacggagggtgaaccaacctccatgattgaaatcgcaggagcagcgtggaatcgttcgaattccccctggaaattaataatgcaggccgcaagaaaaacgcgatcgatcgcgcaaacacgggacgttgttccaattcaatcgagccaaatgaacgcaggcaataacgtgctagacgcaatattcgtacgtcaagtggctgtacctgtacgataccaagatcgcagcaaccactaagatatggggcgtgaatgatcgatcgatcaacactagctatctctagtgacattgcctgcattattcacaaggtaggtaggtacgtacgtatagctaaaccggtgtatgtgaaacgaattctttctactaacggtggattgcaagtttcttctgctcatgattaactaactaacttgtcaaagccccgcagtctttgccttctcagggggtatctagatagctattatctactgctctttcttatatcaggggcagtgtgcgatgcatatccaatcgccatgtttggagggggaagtaacatggggagagagcgatggattggccgctagctagctctcgtagcagccatttctttgggtgcaaaccactgcataaacaaataagcaataattaataacacaaaccatactaaacaatgccttgaaccaattgatatcaaatgtaccatcgtacatagctttcttcacatggacaaagctagatcttgcgctgtatttcgcgtgcggttgctggccagggttggccaccccgggcccacatgccagccacagttatttaggaaaggctaattagtttataaaatgatgcttgattagtaacctaaagtacgagccatgggcagattagttggatcttaattcgtccgttgcaatgctgccaccttggaggttgcttcaaggaaggctcctgaccacaagcaaatactactactacagtactactatactacgctgttgaaatgcagagctttgctcctctgcggctgttcttgttcgcttgcggccggaatacatgcagccaagtacgtgagatgtacgcgctacggacaacgtgcatgtgaaggaggcgctgcttttcaggtcaacattttgtggaagggttttatgttgtgtttgcgtttgcgcagctctgctcggcgatcccagatttgcgtggaggaaactgctctggtactccatggtgacggctcaggcgcggctcaaccgttggatgctgatcggatggtcgatcgggttcggaaaaggcgtgctggttgcttcgggatgaagggcaatggttttacttgagaattactggagtagtagctgaactcggcgagtgagtgtacaggttgaccattttaactcgcactcaagttacttacagtactcctactcctaccttgtgaagcgaataatgtgatcaacattggatagcacaaaatggacgtacgacgcaggtaaacaaatgcagagttgaatcatgggtacctgtaccacgaattattttttgcaggtaacatgtactagatcggttgggcccaacgccacataatttaaagatccggaaaaaagaaaaccaaaatgagagaggggggaggtcgtgacgcgatgatgatgctggcgtgacgtgccggtgccaccgctgttgaagggacgagtcccaatcgtcgaaattatttcggataagcaggacgcgtagtatccagtacagccaacttgggtttaacagacacggtagggactcaatcacatcgtggacccccgtccaccgtgcacggaccgctggaccgttctgttttccctccccgccagtatccacccgtcggatcgtggcctcacggtccagatcatctcatcatcctttccatgcgggctctagcgcccaaccagttcgtacgccgagacgtgtgactgagctgtcccgagccggtcgatgcgtgtcgcgctgcgccccctttgcctcctcccacgaaagcgctcggagccaggcacggtcgctttcaggtaggccgtcacatgcgcgcccgcgactagctgtccctcctgtctccgcccgcccgcgggctgcgccgcgcggcccagccgatggatggggtgagatcggcacgggcgtctgcaaaccgctggggcgttttgtacgcgcgcgcgcgtcatcgacacggcagccgtctcgtcgggttgtggcctttccaccgcgaacgaacccaccggctcgcagctcgcgcacgtctacgcaacgagggatggcagcgtcacatccgtcgcggcatcgaggcatggccccgggaaagcatcggcatgtgcgctctggcggcggcgctggctgctcagcgcgctactagagctctcccgtgtgtggccgggctggattttcgctggttcatccagccgtttctcgtgttgccgggggtgcgactcgtggactcgtgtggcttctcgcgtggggaggccggtgcaaaccggtaaccgaacaccacgccgcggcggtggtccggtgtttgatacggagagtaggtggaccagtgactcggcgagcggtggtcagaactcagaagcaaatggtgattggggttgcttgcttgatcatcttcagtatgatattttaggggaaatacagaaataggttgtgtttagttcagcgcaaagtttagattttggttgaaattggagatgatatgactgaaaagttgtgtgtgtatgccaggttgatgtgatggaaaaggactgaagtttggatccaacacagccatagtattacgattggaatttttaattagtcggtgttttacaagtacaggtctgaaacgaggaatggacctgtacgttatgtagaagagtactgtatatgtaccttaggacgtgagctccatagtttccttggagcggcacggtgatgagatggtacgtgaaagctagcattcatgatcatccatgatccatttcgatcgatactactagctgtgaggattcaaggaattaacacgtaccacttccctgtgtaaaaccctctgaacgtacccacggcccggactacctatgctttgataagtgatataatgtagttatccctacactgactagtggtggttaataacgaagaccgtacgtgaactgtcaacatactttggtagtgtacacacaatatggttagtaactaactaagcaactcgagattaatttgacatcggtgtaacatagctatctgaaccatccatcgttcctgaatcctgatcgtgtgccttacgcttttgtcactcgcacgctaaatttagatcattcttaattcttactctctatgactgactcacttcccctccctctcgtcatagcactagagcagcaaaggcaatttacagtctattcctgatccaatgactgaatttttgatggtgtgttcatggcaagttaacttcccctctcacaggcactgaacgatctgccatatataacggcgtcgatatcctccattccttgttcacggaaagaggataagtgctctatttcgaagtttcaattcgactctgaaatgaagctagcaagattacctcgaccactggactcatgtgacatacacaatcacagattcacagtaggccatgccactgctacacccttgggccaacacgtaactgcaacccttttgtgtagtaggactgtaggagtagatcttgtcgtactggaagaggaatctttagggatttgctggctcccatttcccagcaacactccatctgctacctcgctgccacacacagtttattacctgacgcaggacacaacttgaagccaaagaaagggacacttcacacactttgttgttccttttcccagctcatcatcttattgaatactattcgtgtgcagagatatgtacatgcatcgaaccaggaaaacggaggaaaatttgggtccaaatgccagattaaaatacatgacatttcaaagttgggatgcaaccattgggcactaactttggcccaactagatcgatcggttgcagcctagtaggaaggaagggaatatcgccaaaaaaaggagggactgatcaccgaagctatacatgttgcgaatcgactacacattcgtagacgtgggtacctagctaaagcactcctccgggatgctctgcaacgccggcgaccaccggcagcggcgccttccgacgaccacatcagcagccgctgccacctgcttcttcgcgtgctgccgcttgagcacgctcacgagctgctccagcgccggcggcagcgcgaaggcgccccctccggcgacggccgcggccacctgcttcagctgctgcttgctcagcacgatcttgacgcgcatcccgccgccggcgccctcggcgccagccgcagcggcgtcggcgatggccgcgcccgtggactgctcgatggcagtgaccgtcttggcgtccatctgcagcctcgggcacctcgccagcttcctgccgtcactcctcggcaccggcgtggcagcctccatctccatggatctgagatactctcagcgctcgcgcgcttctattgcagtggcttttgctgttcttttctcagagttctcgcaaactggctgtcctaatgagcagtggagaacgagaatatatagatatataaaaataacatttctgcgtgtctgaagctagagttttatttagagaggtttacgaattagacagctcataggcacctgtctgtgtaaagattagaaagggacgccacgcaataggtggaatcatttttttttcaatgggattagttagttcggtcgttttaatattgatgcatactcagatgtgaataagtagtatagttatctgtgtcaaaccctatttgcatggacgctagctagcttgggcccatacatcacatgctattggcgaatttctgatcggagactagcactagtgctcccctgcaggtttggtccggatttttcaacagctttacaagtggactgttcgctgtattagcctgcgggcaagaaaaagttttgcctgccatgcatgcacaaaagtataagtatatgctagctgcatgtactacacgaataataatcttgaaatattttttcaaccgtgtatactcatgacatatccgttgtagcagacaaattgaaattagttcctgtctgggaattaggatctaatcatttgcagtgaactttgctgcgaaactccctgcgcgctttcaaacttccaagcatgtcttcagttgctaaatgaaaaacttatatatcaacccacatgaatatattcggatcggactctcgcttttctcatgaaattaatccaactgaagggagtacgtacaataaatacgtacggcaggagtactaagtaggacgagtgtctctatacgcacgtagttgtgtatagattcgtcgatcgagaagaactactgctggagacacacacacccgaatattcaggctgtcaattttggcatacgtgcacgtattcggttagcctagtacattcataaattatctgctgcattttggagcctagttagctaccaatgcattatgcatgttgctgtcacacgagcaggtagatagtacgtagtacgtacacgtacaaatcaatgccaatataattaacgtgctggagatggacaatgcagaaattgttaaagatttaatgaggcatgatcagttgaaatcggcctgggcgacgacgattgaagagattaaaggagtgatgcaatgccttcagcaagtgcaagtgcacaagataaagagagaagcaaatagggtagcacatgttttagcacaaatggtaatgtgttccaagtcctgcgcggagtggaggttgtgtgctcccgcaagaattctagatttattaaatcgataaagagagaagcaaatagggtagcacatgttttagcacaaatggtaatgtgttctaggtcctgcgcggagtggaggttgtgtgctcccgcaagaattctagatttattaaatcgataaagagataagcaaatagggtagcacatgttttagcataaatggcaatgtgttctaggtcctgcgcggagtggaggttgtgtgctttcgcaagaattctagatttattaaattagaagtgtaaccctttatttaagcattaataaagctctctctttaccctaaaaaaattaacgtgactcctctccctcctttcggtctgtacgtaatcacgaaccgatcaaccacgtgaaccggtgaggcggtgaacataacaaacttcgtccaagcgtatacgtacgtgcaaacataaagaattaactcgatcgaagcgtcgttagcaatgtagcatgcatgagcattccatcgtcaccgatcacttcagtaaatcagtagcagctgcaggatgtgagtgaaggccgaaagcttgttgaaataaccgtgagacagagccgaaaggctatgaaagaaccgggcgtacatgcgcgcgcgtcgcacaggctcacatggggctcgtgggcgcgatcactgctgtttccgtggacgccagcccgatggcttcggcagtggccgcccatcgatcgatcagggcatcagggagagggagaaggcacggcataggccgggcggctggatgtatgagctggataacgcgtccattttcttatttgacgaatattctcgttcgcctctcactgctatttatgcgtggggagaaggaattaattgtttgcaggggtttgatattcctcttgtagacgaggcggcctgtcttcgaacagctgatcgaacaaattgatcaacaatgaacaagttcttttttttaaaaaaaaacaaacaaacaaactgatcaggaatgaaaaggacggcgtctgctgctcgcatgtatgttccggagtagacaaacgtctgctcatacagatgtacggtacgtgaactgacgttattccagcttatggtcgatattccaacacagtttgaagctgacctcgacaagcctgcccatggggctcatctattgccccacaatttattgtcagtctaaaattcatccttaaaccgcaataggacgtaccattttttttttaaccgaacattcattggtatcagtctcacgggtttttttatatactttaagtgccatatcaacgccacgccacggcagtagaaacaaccatccgtaccatctcggggccactggtttggggagttgagaggcacgttgtactgcgatttgaggacgaatttcagtctcagcgacataaatgaggggccaaaaataaacttaggctgacgttcgtaggtgggtcgaggcggaatacggagtgaaatttacgcccgcatattggcttccgagttaagtttggaagaatcacaggcaggccacagcccacgacatcccctatcgtcaattggacggactctgcaattttcagtgggtcaccaagcccatcatccgttccagttgcgttttattgagtttggaatgtagggctgttttggattgatgaaaaaaaaaagtgcccctctgaatagtaaatacgatatttcactttgtagataaaattattggcattgacgacaaccaatttatcaccaatctagggtgtgttcgggagtaggggttgggaattttcccttgggcacagaaaacagggtgatgatgaattaacgcataattacttgcgtattagtttaaaaacttgaaaaccgattaatattattttaaaagtaacttttctatagaaaaattttataatttgaaaaacatatacgtgaaaaatgaggatagaacttagaaatgtaaattagtatatggaccatagtaaaatatataggagcaacagtcttgaaggatacagttcttccgatatttctagtactagtacatcaaaaaaatgccgatccttctctgatactcccctgcacttcagtagttctgttcggttcagggttgagacttcaactgtcgttgaggctcagctactaccaaacatagatctaatctccctagtaatcaagagtgcgctaagctatttcccccactgaagaagcaaacttccagcaccaaatgcagaaagagccaagcaagattatcccagcttttcccagaagcaagaccaacggtgtccgtattccacgagtaaacagagttccagggctgcaagctacaaaagacccaatcagcgagcagtagctccgaaagtagagtggagtgcactctaaaaaacacatcagtacatcatccatcactcgcatgttagctctagtgctctgttgcagcgccatgcgtacaagccaccggcaccacactaaccaatcaccatcggcagcgacaacttagctagctccagtaatcacaggttctcgtcctcagatcactctctcaggctcccagctgcaacaaacatcgggacggttacagttttgcttggcttgtttggggaattgggcacgtaaaagtatgttcacaaggcgcaatataactgtgcaaacctggcaaaaatgcagggtcacttttagtgacgagatcaagtgggtgatcaccctaagcaagagcgactgatcgatgcttcggtttttctgcttctcttacttggaagcgttgcattggcgatatgtatatttttcttgtccttgcgtgccgtgcatgcgagtataaaacgtagacccggagttttggcatgcaaattaaccgtgtttctcttaagctgtcgatttggtagagacgccaggatgaaggacttggctgtgctggggcacttgttcgtggcggcgttcatgttccacttcgcctcctacatggtcatcccggcgatcaccgacgtgacgatggacgccgtctgccccggccgcgacgagtgctccgtcgccatctacctcagcggcttccagagcgccgtgagtatcgcgcgtttcggattatttaagtcacattttgcgggtgggatttgtgaaaatggaacggcttttggctaatttgcgcagatcacagggatgggggctcttgtggtgactcccatcgtggggaatttgtcggacaaatacggcaggaaggcgctgatgacactgccggtgaccgtggccattctgccgttgtgtatgctctttgcagcatgacttgggtcaccctagcttgatgaaactgcataatgcatctgtgcacattttcatatgttttccacttttttttctggcagttatactggcctgcaaccgctccaaggtgtacttctacgtgtactacgtcgttaaggtcctcgccggcatcttctgcgagggcagcatgcattgcctcttgctcgcctacgtggtaatgaaaacctcactatgatagatcgatcatccaaatacatatttcaaagttattgagatacgcatcctgaataacgaatacgtatatttaacgagaacatgtgacctgtacaattacgacaacagaaagaatgtatactaccacacaaaaaggagtaaaggacaaactaccaatacagtacaactgaacaaacggaaaatacggcgattaggcccactcgtcagcgtaacagaagtgggcggcccaccgcccaatcagggagtccttgaccaggtgaagtttgtggacgcaggccgaccaagtcggcgccaggcggcgagcggcggcgttcgggctcctctccggcgtgtcggcagcggggttcgtctccggaacactcaccgcgcggttcctccagacatcaaccaccttccaggtggcggcggccgtcgccgcggcgacggccatctatctcagggccgttgtcccagattccggcggagccaactccttcgttgacgaagcatgtgatcccttcctacaaggctcatcctgctccgccgcgacttcgtcttcgtcctcctccgatgaggagatctcaccgagacttccgccgcacaagggcggggtgccgtcgttgtcagacatggtttcgcttctcactggcaggttaagttctttcttgcctaactgcaattcgtgccgatactcatattcttttgttagagtttattgacacctatgtttgatggaattttgactataaactgtaatgtgctgatgagtcattgctgctgcctgtagtttgaccctgtcaggggcagcaattgttaccttcttttacagtcttggggaacatgggcttcagactgcattactggtgtctatcccccacctaatctgacaagtattcagtttcaatgtcagttaaatttaacacgaattttcttttacggttgatgtgtctgcagtactacctgaaggcacagtttggttacagcaaagatgagttcgctaatcttctgttaattgctggtgctgcaggaatgctgtcacaggtacgattgtattttttttttcagcagaactgttatatggtaggctttccagcccggagtaggaattgctttttttacattttctgatttctgactaatgataacatgctgttcagctgactgtaatgccggtcttggctcgatttgttggcgaggatatactgcttattataggactcctaggaggatgtactcatgtaacagcttctttcccttgcatttttgaaccgttatgcaataatgtcagcgagtgtgattgtaatccctgaacaattttgtattatatttcaggttttcctgtatggcattgcatggtcatattgggtacttcctttggacttggcaataattctcttgtagtcttattagactcttacccaaaagaatgcaattttggctatatccaaatgtatagacagaactacgctcttgttttgcactaatttgcaatcaggtttagttgcttgctggttcagcagtgcaatagtgcgtttccagcattcactaaaccaatatcagtcatccattacacatatcttcgctaacgttgtcttaatcatctacaggtaccatatttatctgcggtgtttataattctgagtgcttttgttcacccttctgtaagccatatttttcccaacagtttattaaaaacttttttccttccaagcaattcagaacaatattaatcatcttcttctctgtttttctagataagaaccaatgtatcgaagagtgttggatcaaatgagcaggttggtttttcctattgttgctgatcattgtctttgagtatttcaaatgatgacctgtgttgtattagttgacatgactgctaagtttcgctcattattcctattactttggtgttgcctcttagggaattgctcaaggctgtatatcgggcataagctcgtttgccagcatattagctccactaatttttacccctctaacaggtatttttttcatttgtaaataaatcctagtttataacccttgtttcctttaatttactccatagcttttgctttcttgcggcagcatgggtcctttcagaaacagcgccattcaaattcaaaggtttcagtatcatgtgtgctggcttttgtacggtaagatttcaactgaatatgttcagtgcacactttttatgccatactaagaatagagtatatctactctgcagctcattgccttcattatcagcatgaggatgcgagcagggcaatctggtgcaagtgagatgttggccattgtgcagcatgagcaagcatgatgagtatgctagtagattgtaaatttggccaacctgaaaccattgtaaatttacatactgtacattgtaaatttggccaacgtgaaaccatcccattgtctactatcctgatgggcgaatgactattcccctattcctctgcaaatctccatcagggaagggaaggattcttcttcagatagtaaattgacaactgctatgtcatagaagccagcccagcttgttgtaatatcacctagtagtgtatattgctggaatgatggcctacatatttcggccggagcttcagacatgagttaatgccaatggtagtacagatttcaacagcaagtaaaattttctagaattagcaggattactgttagcatcaacacttgttccattacaacggattggattttacctcgtgttaccaatactactaccacccccagaagtctagtttcagagcttccaattaacaatccacgcccacggtatcgacgcagcgtctgaatgcaagggcccgtggtcacctcccgtcgtggtactcgcagtcggcggcgacgccgtggacgggcttgccgaggcttgcctcgcggacgtcgaggcggcagaggacgcggcggtagaacttggagcggacgaggaggccgaggatgtgggcgcgcgcccgcagcacgaaggccatcctgacgggcaccaccgcggggccgaggcggccgttgttgggcttgctgtgcagctccgcgccggcgccgtagagcggcacctgcttccccaccacggacaccgtcaccacgcgcccgctccgccgcggctgatagaactccgccatctgcacgcatgagtgagcacacacgcaacacgatcgttcagtgcagtgtactgtagtgcggtttggttgtgcatcctccgaataaattgtacttccagtatattattgcacgggaaacttttctgtcggaatgagaaaaattgcacttgcactatttaccgtccggtagaaaacaaggaacaaaaatacagaccggaacatgcacagcaagtcaatgagtctatgaaccatgatagggctgggttgctgcgcactgggggccatcatcttgtacagcaaaaggattccctcgccgcagcacagagtaaacaaagcgtacggcaaaagtactgtaactacggtaaagtaacgtaagctaaaggtgtgatgtctgaaacatagaaaagcagtaagggcatgcccaatgcagggcgcacccttacccacatctcatttttacactgcagcacctgtcagtcggtcatattttacatttaaacccttggattatttttatttacatatacatccaatattagcagtataccccctaaaaatcactaggctcccctccttggctcgattcccgtcctcctggtggcgcgatttccccttctccggcggcgccctccccagcacgacctcccctctctctcctcggcgcctcgagcagcggtggcggcggagcttcccggcggcagcagatcgagcagccgctggaggtggggatcgtggcagcgggcgcggatcgaagcggctgcggccacagatcgacgcggtggcggcagatggaggcgcaggaggtggggatcgaggcggcagcggcggatcgaagcagcggcgacgtggatcgacgcgacggccgcggatcgacgcgtcagcggcagggagcgacgcggcagagacggagcttcccgggtacgcctttctctcgagtccaccccttcgccatcttcttccacagtagcggagcagatcgatgcgtcggtggccggcggagcttcccggcggcggcatcttccatcgtggatccgtcacggggagacgacctcgccaacgtgccgctccaagcgtgcttcgctgttctcgagccggggcgagcagaggtgcgcggcgctctgcagaggtccgcgattctttgcagggcgatggtcccgggcgaaaaagtggggcgagctagggataccctccaaggtggagggttgggcatgccctaagggcaagttttatggtggaggtgagtgccacgtctaatttaaaccatgtcatcttttcattaattaagagataacaattacaacatgtcacctctagtacacaaaccccaatattagtttactctcacacatcatcttatatttttcttggagattgtgtggagattgccccttgcatgaggggtggctcattctctctctcctaactcctctcctccgactcatcacctaatctacgtggtaaatttaggggcaacataaaagggcttatataaaggtgcttatagtacttgccaaaaggcaatccttttgagtgttgacgttgaagatggaacaaaggcctgacatatcacattggctctttgcctgtactatgcaacggagtatccagtggtagcgcatgcagcagcggcaagacagtcatcagggaagtgttgtctttttcctctaaaaaaactatagcagagggaggctgaagagtagtcgttctcaaccggtcagtccttacatcagttaccggctggtctttgtgccgtgacaagaacaaaaaatctgctcatatcggcaaatggcaagcgatggcatccctgactcgagtcacgtgaacaccatgcccaccgatagccaatgacgccactgcttgcctctgggtgttattgcgtttccattccaggtcccctttttgctggttctgtgtagtactagtagtagtaggagtatttgttacttgatcacatgcacttcgcccccactttgcacagtactaccagactcaccagtattctagtgaaagaaaatcgctgcagttagccgagcgggtaacttgacagatgatatttttgttactgcggaacgactcacgagctcaccgtctgtgtgtgtgtaaacgctaagaggttctgtgtgtaaaacgctaaatccaagtcctgcctgaatggccgaatgcaagctgctgcacactcaaattctcaaaacaatgcactatcatgcttaagtccaacagcgcctcagaatagccccaatgcatggctgcgaagtctcatctgagatgatccactccgtcgaggaagcaaatggcaatgcaaggctgcaagctatccccggttcgaggatgacaatggaggagccggttttttaaaacgcaactttgttctgtcttccgagtgaagagctgccgaaaaaactaatcaaggacagagacaaataagaagggaaccgtgctgttaggtttagctttctcccgcacctaggcagtaggttagtatactccaccacactatgatgttcatggggatgctcaaaagctgatctaaaccggcaaaaattccacggactgctggcatcacggtcggaatggcataggagattagtactccactatagtcgtgatagaactcatgttagtaatgaagagcacagtacgaataatcgggacaaccctactgatccattgtacagagcccagatccaactcttgattcacccgtttgtttgtgagttgttacgcagtaactagcaataactaccatcgatttacgccagcctaatcaggcacggaaacgtccgcatcacctacccaatccattcagattcaccaaacgtaacgaggatggcataggcaaattcaggtagaagtacgagcagaaaggcgagggttggggtggtggaaagggcacgtacgtggccggtggcgacggtgaggtcgtcgtagaagaggtggaacggcgtggaggtgacgtgcaggctgaagaaggtgccccggttgcggaagcgcagcctgaccgtcgcgttgacggacatcatcttggtcgggacgcccgtccggtccgtgccgccctggatgtggtacgtctcgaacaccacactctacacacacatggagaggaacagcaaatcgtacagcaagtcaataatggagtagcactactacattttatactcctttcaaatttcaattgattcactagaatggcaccagcacagaaacggctagcaaattgatcgcaatatccgcaattccgcatgatgtccaggaagcaaaaactcctgctcctatattgttttaagtagtactcgttctcctagtattcctgtgtgcatgtttcgcggatgcttttactaggtaggagtactcctacagctgttcattggcaaaatgcgtgtacgatcgtcggaacggacgctgcctctagtaaatgcatgcattcagattggatgtacacagcttgtgtttctcttctcttggaaggaagacgggggcaatcggtgccagtaccgatatctcaaaacttgcatatagttgcattcaatcgaaaacatttgggcagattgacaggggttatagtacatttctaaattttctacttagttgttcgtttgagaaggtgaaggaaataaacggaaatgtacactctacactaccatctctactcgcaggacggctaaaatggccagtgttgatttcttgggaaaacgagagtgaacgaggaagccaagaggtgagagacgcaccttgacgacgacgtggggcttgtatgacttgctggcgccccagagcacgagcaggaagaaggcgaacacggccacgaaggcgaacgccccgagggcgtagcacctccactgcgaggcggccccggcgagtcctccttcgtcgtcgtcgtcgtccccgacgctgccggcgccgctgccctgcgcaaggcgtcgccaggggacgccggcagcggcgccggagcggagctggtcggagaagaggaggcggccggtggaagactcccgggagtggtgcacggcggcgccggagtggtggtagtggtagtgcagcggcgactcggccggggtagaacccgcgaacgacatcttctcggccgcggccacgcctccgccgccgccgcctgcgccgcccgaggccaccacgacgtccgggtgggaggcggcggggctgagcacgtagtaggccgaccggcgcggcgaccgcggcggcgaggacggcgccaggctcgtcacgtcggagtccgtcttcgcgtgccgtgccatctcgggagccgcgcggcgcgatgggcgtgaccgcgtgagcgatagagggcacagtggtggattgtggcgaggcgcaaagcgcaacaggtctgggagcctcttcgttgatagtaagcgcaacggattgtggcgaggtttttaagtggaacgcgaggggttttcgtttccaaagtttggagctgtgtgcgccgcgagggtggcggccgttgggcgaccgcggagtaatgtgggggcggctggctcactctggctcgtggctggctagctactactggcgagaccgcgagactgaagctttgagctggtcccgtatgagcggagagacccactgcattgaaggcctgctcagcacctcggccgcaatggagatgtcaggaatggtcgaaccaattacactattttgagcttaagccacaatagaccttccacggcccatctcatcacacggtatagcctgttaagattattgcgggcgaataagttcatctgagggcccttaacttatcaagaatccgattttgatccttcaatcggaaaacaatacgtaacgggtccctcaactatcaaaactagtgcaaaataagttccaatgatggtttggacggcggtttcagctgacgtgatgtctatgtggctaatttgactcggtcttcatctgacgtggcattgacatggcgcttacgtggcagtttggtttggcaaataatataatcgtgaccctacatgttagtgtcgatggggatactcgtagaccagatgaatagagtattggggtacgttggtacaaggatttatacgatatgacatcaagcaaacaagaaaacaaggattatactaattcgggccttcgtaaggtagaagccttaatctagtttatatgagatagatatggaaataccacatattacaataaagaaccgacgatcctgatattaccggcgagatcccttgtcgagatggtttcgatgagatctcccggcaagtaggcttcacgtcctccggattgtaggctatggcgattgtgtttggcactatgattcaatgatctgaacccctctaagtggtgtgccttttataccctgagtcatcttagtctcaaagtagaactcgaagacaacagaccctacactatatagtatcaacccaatcctctttgagtaggactctaacattcctcttcttgtgaggataatttccataacagcttgtgaatttccttattgtatacggaaatacatcatatatacaaaggtatgccgtatccgcatattcgataagtcgtaggatttgaggaatactttatttttaaccatgatagttagttacacccaaaaaaaaataaaaatggtggggcccacgggggctccctctttcctcctctcccctctcttcatcggtgatggtgagtctacgacattcgaccggtgcgtgaggccctcggcttgcccgagtgagtcgaacccgccgatgaacgctgcggctggcgggaaaggaatggcgcgtaacggccatcggtggcagagcgtcggaggaggatcacgtcgacgtcggatgccgcgacgtcggggctccaggttaggtcgacgaagggcagcgactcccagcagccccaccatgcacatgagagcaccgaggtgcgaaccacctcgtagatgtgaaggcggtcgatgatgttgtcgaggacttcgacgtggagcgcacccagcgcatccggcggcaactccgccttcaccgccgctagctgcctcttctaggtgggcagggaggctaccatttcttagtgcttttcccaaattcgcgtgcgtgcgtccccgtcttaccctgcgtgctttgcttcctcccttccagaaaccctcttccgcctccatcaccacgaagcctgcaatccatggaggtcgacggcgtagcccgccccttcctcctcttctccaagcccaagtccagcaagaagaaacccaagcaagaagctgagccccagctagaacccctaaaccctagctccgcgtcatggagcccgaacattgtgactccaactaggccctactgtcgtggccaccaccgccgccgcggaatccgctatggtgctgtccaccttcgtcgaacttgggctatcgcaatggctagtggatgtgtgcgatttactaggggatgcatagccccatggtcgtgcagcggcagtgcatcccgcgggtgcttgaggggagggacgtgttggggatcgcggagacggggagcgagaagacactgcgttcacgctgcccatcttgcaccgccttggcgaggacccttttggcgtcgcgctgtcctattgaaccatggcaccagcaactctgacgtcccaaaaaggatcatttatgggataagtttttctaggagtttatttgtaaaattagtttttgaaaaggaccaaattgtaaaaaatccaatgtggttggttgcatgcgccggtgcattagggttttccgcctctagtcaaatagatcctccagcgtaagcttttttggcatccaatctcaagttgttcctacttcaattctctattctcttaaggaacaaattggtataagtacgataatgtatggataggaaggagtgtagcaggctagcggcaatatctttcttaatatttgacaattttagctttctgatttatggcatattcagattgtagccaaaatgaaccttacaagttttggcaataccaaaattatagcaagacggcaatattgccaaaattttggcaggatttcttatgtattggtcaaatttggcaacaaactaaacgtatatattttttttgcaactttgacaaataatggtatggttgaaaatgacatcaaagtgaacatgcccttaaactgtatagattttctctcgtccatcgttttgtaccgcacggtaccagtaccatgaggtaccagtcttcatccggccgttgattgctgaggggtacgatggggatgggagtatgcgcgaggttcgctccggtgtggggtcccaacgtttctagctacgtgcggcttcgtttaggtcatccccatcgcatctcacgataccgtcgcccatcgcatctcacgctagcgccgccgcacgggtgttcatctgaggaggagggcgagcgcttctgtaaccgtcgccgtacgggtggtgacatcctggcagcgccgcggccgcaggagtcgtcgccgccgccgctgcaaggtccgccgccgcagtggccggcggtgcagctgcaagggccggtgccatacgcttcaaggttcgccgccgccgtggccggcgcagcagctgcaaggccggcgccatcctctgcgccatccgccgcagtggccagtaagcttttgtttgattttattctgctgttcgttttttgtttgaccggatttgagtatgttcaccattgtttcgctgcaagaaaatttgcataataatactatgaaataaccaatgttacaggaggttgaccaatgcgatactttaatctgggtagaccaagatggcatccaagagtgcagaaggcattcgagaagctttggcttgcattggatcgtactagcatgacaaatccaaccaggcggcaatatgaatggtctaactatattgatagagcgaaagttgaggaagacaaaatgaaacttgaatttgagatggctgccaggattttggctaccgaagcaacatataagaaaaaaatttcaaagctcaaaaaagaggcagaccacgctagaagttggttcatgggttccctagttgttattgtaattcttatgtacaagatttcagagtatatgtatcactgttgactatattatgtctgagctgtactttgctacctgcaatttaacatatcaattttaacaatgcttttcggatttctcacatctgaaatgacatcaaaattatgaatgtggctgtcagtctcatgcatgagtgaagtacatcattttcagattcacatataccatgttcacatacagataaaatagttagcttcagccatgtcagtacaactccaaattgcaatacatccatcatatcttcaattccagaaatcaccaagcattgcatgtaccataaaacatacagaaatataaaactagctgcaaccatgtcattaaactcatctcttcaattccagaagtaaccaataccaaaacacagcttgaaaacgtaatattacaggaaaacacatcaagattgattacagtccaatgactccattataaaatgcctccaatactacaggaacggacaagagcatgacaaatttatcaaacgtctagaacaaattgtgtgcttgtacttcatatccatctcaaacatcttcttgtactttcctgaaattgtaagcttcactcatccatggccgaacacgcacgcatacatcgaagtcccgcgacgatttggacaaggggaaaaaggcggtgtcgagaggaatggatgaggcgccgccgcgaaggggagaatggcaaaccgatggtttgccttctgcagctcttcccagagaaccaaggatgcgccgccgccgccgccgccgccgcgaacgggataccaccgccgccacctagggttctgctactctgccgcgcttccccaactcagccaaaccttgcaccgatccaaaaatccctccatttacgattatacccttccaccgtggctctctcgcgctaaccacaccaatgaccaacaacggtcaggattttagtatctcatggtactagtaccacgtggtacaaaaagaaggaccgaaacaacactctaaactgtaactatggattacttttaaatttttcatcatgtaaataattactacctctatttcaggttataagatgttttaactttagttaaagtcaaactgattcaagcttgactaaacttgtaaaaaaaatattttcaacctaagataaatttattataaaaatatatttaattatcgatttaatgaaactacttatttataaatttagtcgaatttaaagtagtttgattttaatcaaagtcaaagcgtgttgtaacctacaacggagagggtatccctttaattattcttttacattcgtccaatcctatcacagtagttaaagtgctaatctcctttctacctgaccgggctcacctggctctgacgaagcatatacctccttttcatttgccatgatacttgataaatactcccgactggtgtgcgtgcccgactgcccgcatgcctatccttctttttggtctgccttaactgcttgcaagttcgtgttgtcctctcgttgaactctacaaacgcgaagctaacaagtaacaactcacgacgtaacgcgcgagcctagtttacgtgatagacgacgccacgagaggccaaaaaaacggaggacagaaaatacatctgaaaacaccaggcgcgtcgcgcagtgcatgggcacatcactgtcgacggcaagccgccaaaaccgaacagccgaacacgcacacctactactacgatttccgcggaaacacgccacgcgacagccggcgcgtgtctggtactctggtttggcccatacaactgtaccgtcctccccttgcgcatgcagagcgccatggccgctcgcgctgccgcgtcaccggccggtatgaaacgagacgaaggcgcaatctagcagcgcacgtactgtacatccttgcagttgccggagggaggctgcatagccggccgaggcgtaaagtagctggcaccgtggtgtgaactgaaatctcagggcctcgtcgcggtcgttggattgacctgctacgagccagctcaggccgtgcgcgtttactgaacagtaaatatacagacgaaaaaaaaaattgcagcagcttttcgttgcctgcaggtcgtctctcttgcgtatgaccgcacttatctgtctgtcgcgagatttcgcacgtacacgtatcgttcttctttaccggtattgatgtggtgagcatatctaggaacatatgcgaggtaggaactgtgctttttttaggtctcaagtcaagctactagggagtagaaagggagcacacacacatgatgctcggttgacgaaagcgatggtgaattggtgatctgtccaatattgtacaacgaatccatcatacctggtttcccacgaacgggatgcaaacggaaccgaagctaacataggacacacgagtttcatttgttgtgttgctccacgtcgcgtcgcctccagatatatagaatcccattcgcatgccatatgttctgtacttgctgtcttgcttctgtttgcttttgaggcccaccctaacatgttacttagctggtggcctgatcagatatggtgctaatcgctgcaccctgatttggaccgactaaacgtttttttgttcgtttcctacatgcctgccaaacagaacaaagatagctgtttgcacagtccattccaaatcttggccgtgctcccatgccagtgcatgtctttatgacgaaatgatgaccatctatctaaatcacgagattatatgacagtaaccaagaaacggacatgccaatggagtgtttaggcaagagacggaactgaaagcagagatcacatgttgctcgtgtatatggatcgtttttttgcgtctatggagcgaaacttttctctgaaacatggccggcacaaacacaaccgccacgaccgtgtgatccacattcaccaagaccgtgagatccatcacagcaatcccacaatcacgaccgtgagttccacaattaccaagaccttgagatcagtcagcaccacagtgccactgccacccacaaatcaccacaaccctgagatccatcaccaagatgctaaacttttcccgtcgccgttacccaatacaaaaatggccactagccacagcagttcacgttctcaccacacagcctttttagtgccctgattatataatcttcctcgttaatcacagtttctaaatcttagttaccgaatgctaattccacttacaatcatttttatttctttacaaaatgctaattgcgacacgcactcccgaatccccgccgctagtctcgcccacagaagattcgaacacatacagaattacacggaccacaatcgtttggttaccactaatcacatattctaattgatcctgttcctgatcatgtaccgaacacctgccatgccatgccacgtacgtggagtggccaccaaaccccgcgccgctcgttgccgccggcgcgagtggctgtgccggtacacggaagacgcggcttccgtgcgcgccccgatgcgggggtggcggaaaggaggacaagcgttggcagctagctgcgcgcctccacgttgttccggaacgttccatcgcatcgttaactgaaacgagaggcagtattaatcccctagttaaactctggctaagtatagcagagacgccggccgagaggagtggggggagagggaggaggaggaggagagtggctactagtactagctatctttggagtgggcgtttcttggccggcggcgatggagcaggtgcggcggaagagtagcctgaggtcgcatggctcaggcaagtcctcgccgcgggtgggatcgggggtgttcgatgagcggtccggactggcggccgatcgtgacggcggcgaggaaggggaggtggtcgtgaggatcgacggggaggggccttgccgcgagccgttcgcgttccccggccaggatggcggtggggcggggaatgtgagcccgaacaccgactccacggcgagcacgccgcggggggcgagcaggacgtggtccagctggaccaactcgccgcgatccccgcccaaggtgaggcgggacgggagcgttgagttttggaagaatgatggcggcggggacgggggcagcgatgggggtggaggcagaggcggtggcggtggcggtggcggtggccggcgcgcctgcgaggcgttcagcttcaagaaccgggcgccgccgcggccttcgtcgtcgcaggcgtcgtccccttcgctatcgccgcagccggcacacgctgcgggtgcggtagacggcggcgaggatccgcccacgcgtctcatcgggaacttccttcggaaacagaaggcgtccggcgccgagctgtcgctggacctcgacatggaggagctcgggaggccgtcgcaactgcatgcgcagccatccttctcaaactccctggaacgcgaggcgcgagtctccttccaaccgaaaaggcgtgtcgcctcgtcctctgactccgactccgacaccggaggtagccgtaggcgcggcggcgacgacggcgaggttgttcgctgcacgtccagttccactgcagcgggacacttgatgcgagccaaaacgcgatcccggctgatggacccgccgccgcagccccagccggcgtccgcggtccctcccgtcggcgacgaggagaggagatcctctgtcttgcggacgcctacgaagtccggccagttcatctcgggcctcatgaccggcaagtccgggcaaatcgccaagtcgggcccgttggaagaggaggaggaggacccattcatggacgaggacatccccgacgaattcaagcgcgggaagctggacgccatcactatccttcagtggctcagcttggtgctcatcatcgcggcattggcgtgcagtctcaccatcaaggccctgtccgggaagaaggtctgggggctgcacctctggaagtgggagctcctcgtgttcgtgctcatctgcggccgccttgtctccggctgggtcatccggatcgccgtgttctgcgtcgagcgcaacttcttgctgcgcaagcgcgtgctctacttcgtgtacggcgtgcgcagcgccgtgcagaacgcgctctggctcggcctggtactctcctcttggcacttcatgttcgacaagaacgtccagcgggagacgaactcgcctgtgctgccctacgtgcagaagatactgttctgcttcctcgtcgccacgctcatccgcctcgtcaagacgctgctgctcaaggtgctggcatcctccttccatgtcaacacatactttgaccggattcaggaggcattgttcaaccagtttgtcatcgagacgctctccgggccgcccctagttgacgaaaaccaattccttgctgagatgcatgagcttcaacgcgcaggagcaaccatcccagctgagctccgttccactgtaccaaccaagaatctttcagggcaaaggagtattcggatgtccggggtgattcctaagggagaagggagcaagcagctgtcaaaagagaaaggagagcaccagattgaggaggggatcaccattgacaagcttcataaactcaaccagaaaaatatctcagcttggaacatgaaaaggttgatgaggattgttcggtttgggacgctcacgacaatggatgagcagatacagcaggcaacgggtgagggggatgagtcagcgacacagattcgtagtgaatatgaagccaagattgctgccaagaagatctttcacaatgtggcgaagcctggctccaagtaagtgtcttcattgtcagtagtatagtatggttagattccctaatctcctgcaagtgccatcattgctagttcttacaatatagataatcagacaagcaactgcaatttatctgtaatgtaggaactgttagttcgtgcggtggtcgtgcggacagtcagtgttatttcattggagatgctagtatgctaatatttcatcctatatatctttagtattaagttacaggtgtttaaagcttattgaaaacagggattgcaaaaattctgaacttgcacatttctgatcaaattcctaatcacaaacatatgaatactgcaggtatatatacttgtcagatttgctgcgtttcatgaggcaggaagaagccatcaaaacaatggatcttttcgaaggagcacaggagcacagcagggttagcaagagatctctaaagaactgggtggtaatgatctttcacgatattgatttataataacgagtcacagggtgtgtttggttctttgccaatatcaactataccaaaatattggtgttgccaaaaaaaaaaggtgctcatttggtttgcaactaaaattttgttatccctttggcaccaaacgaaataccagtacctacatattttggcaacaatccaaacatgcaccttaccaaaattttttggcaatgaccaaatcttgccattgcccccaaaaaatgggcaaggctaacaatggcagtaatccaaacattcccgtagctagttctgaaaatgcccttgctaatattgttgtatgtattcttctgtaggtgaatgcatttagagagcgcaaagcccttgccctaacacttaatgatacaaagactgcagtgaacaagctcaaccagatggttaatgttgttgttgggataattgtgtttgccctctggctacttattctgggtatagcaacaacacatttctttgtcttcctcagttcacaagttcttgtggcagtttttgtatttgggaatactttgaagacaatttttgaggcaattgtgttcttgttcgtgatgcatccttatgatgttggtgatcgctgcgaaatagaagattgtcaggtagtgggaaagttctttaatcttcattcatgaatattaccttgcattcatttactaaagattgaactacttgaatttcaggtggttgttgaggaaatgaatataatgacaacagtgtttctccgatatgataacctgaagatctattatccaaacagtgtacttgccacaaaaccgattatgaattactacaggagtcctgatatgggagaaggaattgacttctccgttcatgttgccaccccagtggagaaattagcccttatgaaggaaagattattacggtatgtattagtgttcttatcttgttgcaatacaatccgacctcatgaaatctaatcaacaatgaatgattaactatgaatgtaaaaatgcaactatgagaatttgattctgttaatactgtctactggagtccgaaagaagtgcctgcactcttgccccacctaaggcctatgaattagcactaaattagggcataagaacatttcatcatagttacagccttcctatcagattataaaatcagtcaggcatctatgagctcatttgctgcttatgttagtatcttaccacgccgagctaatcaatattttcacttctaaatttcagttacatcgacaacaagaaggaccattggtatcctggtgcaatgattgtcctccgtgatgtggatgacaccaacaagctgaaagtgtccatatggctccggcacacactcaactggcaggacatggggatgaggttcgtaaggagggagctggtgctccaagagatgatcaaagttctcaaggacctcgacatagaatacaggatgctgccactcgacgtgaacgtgcgaaacgcgccccctatccagtccacgaggatgccaacgacatggaactattcctgattactgaatcggtgaatgcaccagatcattcagctatgagattacagagaggaggaaatgcctttgatcgagtttgagctgcaagatcctggtggcaactagcaagtgttctgcgctgcaagagcttggtaacaactagcaagtagtggatagcatgtaaaaactagcaatggttgttattgttagtgtgcttgaagccatcatcacttggtagttggtgcagtatgtaattactggtgctgtgtagttgatggataacgtagatacagagataaagagttttcattccaaatggtgaaagcagtaataaaaagttcaatgggtgaactcctatttctgattccgacggctagcccaggcaaccaacgacccttgccgtgaagctgcgaggccaatggcctgctgcgtcgttcgtcgagtctgatactctggtttttgtatctgatactctggtggagatgtagatcggcgccggctctggtggtgcgcatgaagcaccggccaccggctggtttctgtttaaatggttgcgccttccatcgcgtgctagaatagagggggcagccatggctgcatccatgttgggtccgggtgcaagtaattcagggattgtggagagatgtgggattatctgaccagtggtgtggagtgactctaaagtcacctgacctagaggatcccagtccggtgtgatgtgtgctgcgtcgtacctgaatagaacttgccagaagaattgatttgagaaggtgagattcctagtataagcttgacccaattggcaatgattttcaactcaaacctaagtcaatcaagctaaaactacaaatgctctaactatcatggctaatttcacccgaaaacgaagaaccagtaatatactttatgaggatcgaaattatgctttgatgattccaaatgaacaattgatacaattgggaagctcaatacaggctttgaaattgtgatcagattatatatattaagcacatgtaacaccaaggcatagcaattgtggtagtttatcctaagaattcttcatttagtcacatcgtcttatttcagcaactaactaaagatcagaaccgcagcataagtatccagacatctgccctagatggcaatggcgtaatctttatatttctcattgaaacttataatttcagagatgaattgctcaccaaatctcagcagcatataactccatatataaccacttgctcagaacttcaaatatccggtagcatcaaggttggtctgcgcggtccgtgcctacggcgttgtagctgcatcctgcagctcgaatcccctctccaccgcatagtccacgaagctgtacaagggaagcaccctttcgccatacttgtcaccgaacctgtcggcctccatcttggcctgcgctttgagctcctctacgatgccgagcgctcgatccatgcccagcgcgcgcaggacgctggcattgctcctcatcttgccgttgcccgacgcgctccggatgtcgtcgacgagctggtacaggacgccgatggtgcggccgtagcgccgcagcgcggcctcctcgtcgggccccgcgcctcccagcatggcgccgcaggcggcggagcactccgccatctcgccgaacttcttcgtcagaaccttcatgacctcggcctcgccgagggcggtggcgccggcgaggtcgaggaattggccggccgccatgcctgtggatcccacggcgcgcgctagctccccgaggacgcggaggaggacggcgtggggtacggggtcgggcgacggagtgtgggcgatgacgtgggtgtaggcgagggggaagagcgcgtccccggcgaggacggccatgtcggtgccgtaggcggcgtgggtggaggggcgcccgcggcgggtgggcgcggcgtcgaagcatgggaggtcgtcgtgcacgagcgacgccgcgtggagcatctcgagggccacagcggcggggagcgcggcctcgcgcggcgcgccgaggagctcgcaggcggcgacgcagaggaccgggggcgcgcgcttggcggtgccctcgttgccggcgcccgggaggacggcgtagcgcatggcggagtggattctctccggcgtgcggatgggcatcgcggcgtcgagctcggcctccacatcggcgatcagggatgtccaatagaggcgcaaatcgaaggaaggggaggcggcggcggcggcagaggaggcccggatgggaaggaagcgggtggatttggaggtggaaggcagcttggcgaaggggagggacatggagaaggaggagagagccatggcgctgatgaaagggggagattggaattggattgggggttcacaacttcagatgtggtttccttgacggatttgataacgccgtccgctcttctctttattcgctaaccatccactactagtggagtgcactcgtgtcgtgtgaacctgtccagcaatttctcattcgctaaccatgttagtcgtgtgaatgtggtggcagcacaaatgcacaatggcacgctcaccgcgaacacgttttcctacatttttatggaaaaatttggatagttccaacttgcaagtgtaaaaagtatatgaaattgtaatcatcatgacacatcacagtctttgaaaagtgctcatataagtagggatgtaaatgtgtacattaagtcagtgtgcgcgtggtgatcgtgtacgtttgtatttccttccttctgaaatataaggattttggatggcacatagaaatatttatcttgtttagattcgtagtaatacgacgtgtcttattaatctaaattctctaagacgaatgaagtataatgtttcttttctttttgaaaagagaaaattatatacgggctctaaggccaaataaccatgtatcaatgacaacgatgttggtatctcatcatttttcgacgtcctaaatatttatcatcgaaaacaagtttacaatattatacccttcaataaaaacatatttattttcgatattattctcttcaataatttttttgacgtttatagatttggtaaagcataaaaaaattccaatatcaattttatatcaaaataagcttaagatctaataaattttatgatgattataggttttttaagacaaatatatgctgaacaattcttttggtttcaaactaagcatttcaaaaattattgatagttagaaaattaaaagtttaactaaatcttaacctaagcatcaagagggccctcaatccaagcgaatagttcgttcagattcgtagtattaggttgcattcgttcatgtaggttggaaactcattccctccgggcgaaaaatggagcggtccattaacgcgtgattaattaagtattagctaatttttttaaaaaaatggatcaatatgattttttaagcaactttaatatagaaactttttacaaaaaatacaatgtttagcagtttgaaaagcgtgcgcgtagaaaacgaagaagaggggttgggaaccctgggcaaagaacatagccttagtatgtgtcatatccatccaaagttatttatatttgggttgtttgtttgtgctagctgtggcagcacagccgtagcagctgctgcagccacaattaatttttcgattgctactattgttgctccagatgcctgcagctggaaagtagcacaaacgatcaaccccattgtgggatggaggaactaaaacttaatttttatcttgttcataatacttccgtgtataactattctcctcctccttcatcctctatctatctatctatctatgttcatttcctcatttaactagctgagactgtttggatggaggttaactttatcactatcggttagtcacaattgtgataaactttgtcttgaaaataagagtatatataatgtgtgagctaacatactaataaagtgtgacttaactccaagtgtaacacacaatcaaacactgtataagaaattacgctacacctaagatttgacatggtaaaattcgactatcaaccaaacagcctgccgttcttctcgagctccatgccaactaacctagctctatgacgacctggtcattgattcatatcaccgtcctttaacccatttctgaaggatgtaaatatgtgatgtcgacgaggataaatagaatgaaccggcaaacaaaagtatgttgatatgcaatagaataggagttctaacagggcaagcaaaagagttcgtatctcgggcgttgctagtgaggtttgagccagacatatatgctaccctctttgtcacgcgtacatatgaggtgcacttggcttggaccgaatgccatgagctagctgttccgctgtcgtgtgaccaatgttaattaagtgtgtaaggcggaagaaacatgattgttgcccttcttgtaaaatgagaatttctattagcacgacccatgactattattagtgtttttacagtgctccaatcctcttgcccctcgaggtactaggagttgttaatgttagttgttcattgactaagactatatttggcaatagtatgcataactctacaaatagcaagccaattataagtaggaagggtatcctgtgcacacgggagtacagctgcactcgtgtacacgtgcgtccggatccgttcgatcgacatcctacggccaagtctcctagcgtggcaattttacgaatacacgcccgcctcctccacttctgttttgcagaacagcccatctggtaccgcctcttcagctgatctcgttaatcacggcgctgatatgctacgcctcttcagctcctcttgtggttccatgcgcggcgcgccgccggcaaaatatttcatcgaggcgaaggggatcgttgttttgctctcagatgtcttctgttcatccgaaccttgtgactacttcgaatcattctacaccatcaagagacgaatcattccactacttcgaacctgatgctacggtatttttagtttcttctcattcatatcgttcatatacaggctagttagggatagctggtgctggcgtgcggctgctccatattgcatacatcaagagacaagattagattgcactaattttcgttcagactagctacagatttccataacctggcaagtacactgtattgttgttactgcatattaaggtaggtaactccaacataattgttcactcaaggaaattaaaggtttaatctcagttgtttgctatctgtttttttttttgcagatggaggcaataaatagattggatgtgcgagataactcagatatttattcaaatgatgatataacttctccagtaatagaggatgacaacaccagtacaccaaaaaaaatatcaagaattccactcaatgtaagtacactggcaatttaaaaattatgactgaggtgctttaaaatgcttattgcaatgtatatgtgattttgcagtgctccgtttttacaccagagtgtgatgataagataaggcctgcggtagggatgacatttgaagatattgcctctgttgaaaaattttacaagtcatatgcacaccaagttgggttctcagtgcgtattgggcagcaaaagaagttggatggcgtggttcagtgcaagcactttgtgtgctcaaggcaaggatggaaacatgtgaatgataaggagattgttgatccatcgaagaaaaaaaagattaaattgaaagaaactagatgtggatgtgatgcacacatttacgtgaagctatgttctgataacaagtacacgatagcttccttggttgagcaccatagtcatggacttgtatcgccagataagctgcatttgataagatcaaatcgtgaagttagtgagagggcaaaaactacactcttcacatgcagcagagcaagcataggaacctcccaggcatataggctccttcacgtgagtgatgggggatttcagaatgttggatgcactaagagagacttgcagaattactatcgggacctaagaaagaaaattaagaatgcggatgctcaaatgtttgtggcccagctatgtagaaaaaatgaggtcaattcatcctttttttatgattttgatgtggatgaacatggcagattgaagtatgtgttttgggcagatgctacaagcaggaagaactatagtcactttggcgatatcgtatcatttgattctacgtacaccactaaccagtatgacatgatttttgcaccatttactggggtaaatcatcacttgcaaagtgtgttttatggtgctgcattcttagcaaatgagaagattccagcatatgtttggttgtttaagaccttcctaagagcaatgggagggaaagcccctacactcatcataactgacgaagatgccagcatgaaagcagctattgaaaaagtttttccaaccacggtgcataggttgtgtatgtggcatatcatggaaaaaatgtcagacaagatcggaccactatggagagaagactgcgatttaagggaaatgatgaagtcatgtgtttggagatcagaaactgctactgagttcgaatcacagtggaaatctatcattttggactttcacttggaggacaatgagtggctgtcaaataggtttgacattcgtaaatcatggattccagcatatttcatggacatatctttggctggcattctcaaaacaacttcaaggtcagagagtgcaaattcgtttttcaaccgtttcattcatcgcaagcttgctcttgttgagttttggctcaggtttgtcacatctttagaatgccaacgccaagaggagttgaaggcagataacacaagcatccatacaacatacaaacctgtaactccttgggcaatggagacacaaggtagcattatgttcacgcatgaggtttttgacaaacttcgagaagagattatagccgccagagatctttgttgtgttaaagacattgcacaatgtgatgggttgaaaattgttaccattagtgatggatctcacaagctcagggtagtccgttgcaatacaacgacaatgatagcgaactgttcgtgcaagctatttgagtccgatgggatcccgtgtcatcatattattctagttttgagaggtgaaaatcaaaatgagttaccaactgcatacatcatgaagagatgggagaaaagagtgaaaaggtaatgtgtgcatatactctttgcttgaatcttttagttttagtcagttcatgaaaaaaattgtacagtgcatacactcactatttttttttgaaactggtttcctaaccacatcgttatcgtagggagaatgtgtatgacgaacaaggcaaccttatagaagagaagccaattgactcctcggaggcggcaatgagaaagaaaatatcaattgcacgcaacaaatttgaagatctcatacaaaaggctaagcactcagatgaaggcattgacttcttaacatctagtgtgttcaaccttgaggcacccttggaccaaatggtgtctaatgtcaagcatactagacatgaggagtttgagtcttttcttggttgcacaattcctactgaaattgatatacacccaccaactgatattcattcgagggggagaagcaaaagaattagaagaagcaaggatgacaatactggtaagaagcagggtggcaaggaacggacaccacggatctgcaagatttgcaaacaaatggtgtttcaagatttgcacaggatatgctgcctttgtttgcaaatcatgaaacttgtcctagtgccatatatatccaaacgggttttactcgttctatatgctgatgtgacatgtcatggagatgcctacgtatcggtgagatcccaatttcagtgacatattgatagttttttttagaaaattcttttatccccctctttttaattttttaaaaaacaacttcccccatcacttttctttaattttattttttctatatggctaacatgtagtcactaccatggtatgtcacgtcagcacacggattgagtcagaactcgtttggacctatgagaccccaggataagtttggggggctgaaaaatatattttgtgattctaaaatgataaatatggttgtatgcaaaataactctggacaaaattgcacttctttttttttcataacacttggtttatggggaatttcggaagtacaaattgtgtttgtgccttcaagtaaagtattatctatttgatcacagtggattgatggttgcgcatcctatatacttatatagttcatccccactaagtgcacttaatgctatttctctcttctctcataaagccacatcattctaattatttttagcctttggatggtatatatatggtacaaatagtctcttctttcttctatcataaaaccatacaatttcaatcgtttttttcttcaaaattcatatgtatcaattatataaaatatgttcaccttgcattatatttgcaatcatgtgtaaattatataaaacataggaagtcattttattttcttttacaaaatataatatagcttatttgtacatactatacaacttaatttcccgcagcaacacggcggggtaatcatctattatttggagaaatttgggtcttaataaagaaatccttggtggaataattaatcctgacatattggtccattgagccacctgataaaaaacaaagtttattactcaagttcatttacatatgtttggtttgtgggtggggtgggttggatcaaattcatcactgtttttagggtggggtgataccgtctatccgtaaggcacgagagagttgatgatcctatgttttatattgcagctcatatgccagcaaggaagaaaagtgagttggattggtatgtcaactttttagggataaggccaatccgaatcttagatgggtacaattccatcttacttatttttaaaccaaataccctgataaataaataggttcgacccaacccaatcccgtcccttaaccaaaagcatgctttgattgacccatccaacatcaagttcttttgtagatggattttcatccttccagaagatgtcccctctttttttatgtcatctaaatagttatagaaaattttttaaaaacaatatatgaaaatatagattaatatgaaatataccaatccacaaaaggcaaaattcaacatatataagttgtaaaaaaagttaaactaaatatctctcgagaaataaaaacacttttcggattcttttagacaaagccgtgaccttttgttacgaccaaaccaacgagaaataatcaccggacggcagttggtccgagacggcctgactagcaaaccaatgcaaacatatactactgatcagcgtgaaaacacggaccacggaagggcaagcgtaaatacgttgtgagttattcttcccatcatcctatttaactttcccgcgagtagccttgtagaactccagcagcccagtgtactgtaattgatcgatcgtatatggccgtgttttagttcgtgtgccaaatttttatttaagcatacggatacacatttacagtattaaacatagattaatagaaaacaaattatagattccacctgtaaactgtgaaacaaatttattaaacctaattaatctatcattagtaaatatttactgtcacccgaccaccaactcggccaccgtcaccggcggccgccggctcaacattttcgagggccctaggcgaacttcacactatatgcccttaagaagttaagagtattttttttaacttgtaatatatactctataaaccacaaatactatagtaacataaataaacatttctaacgtggtaaataataaatcaagcagtttacaagttgcaatatagtaatttgtttcgataaaataatatcgatagtatgattgacaacttaaaaaaacatagtagaaacaaagtactatgacctaaaatcagtgagggaaaaatctatataatcaagggcctaggcctaatgaaaactaatccaccatataccttaatttaattagcttatggacttatggtgcactgaatggttgtatacttatattgatcccttgaacggttgaaccagaatggtagaaccctaagtccctaatctaggtaatttaatggggaacaaaaaataaattaaaagaacagttcaattcgaatcagtgaagagaatcgatggattggatcatcacctgatctagtgagaaggatcaatggattggatcatcaattctaatcagtgagaaggatcaattctaagctattgggctaaatacctatatagggtatatacctggatcggagcctccattttggctgggccctaggccatcgcccttatggccctgctccagagccggccgtccggcggggtgccagggacggtgcaattcagcctgccgccgcagtcgccggacttggagctggcctgggcaaagaccgtgttgccactgccgctgagggagcatccggtgctcgccagatggtgacgccgggggaacacgttgacggcccacacgagccctggggtgaggtgagccattagccgccgacgattgggagggcgcccgcgcgcaccgtgaaggtgcagttgttgacgatggtaacggtagcgccgcaggccaatggctggaggatgagcggcatcgagaaggtaaccggtgaagttggagactccatgctgtgaactaccagtgcgagctcaagcgtagtgctagcgtttgttgttatggatttggccgtgattgtgcaagcgtttaaacagtgtatgtgctgaccaagagctggaacatggatatggatcatatgccgtggacctgaggttgttaccgttttttttttttgacaatttggtccttttaaaaaacttattttgaaaactaaccctcgccaaaaacttcaaccaaaaatagactgtgggctcagcgccagttccgttggcgctgagttccaacgggtcagcgccagtgactttggcgctgaacccttgcccacgtggatcaccagtcgatccgattgccgacgtggcgtagggtcagcgccaatgcatttggcactgacctccgtatagctcttaagtatgtgtagtatgcattggcgctgacctccgtatagctcttaactatgtgtagtatattttcaaatcaagtagtaatgtgtagcgcagtggtgaagcccatcccttggctagttggtgacctgggttcgaaacttgagctttgcaccttttttttcgcatttatatgggcaacagagaaataccaaaaaaagagtgcagacatgggggatcgaacttaaaatctggtgaaaaccaaacaagcatttcaaccactgcactatcaatagatcctggtaatgaatagcacactgtctacttattatgtaccacgtccacaatcaactctgctagcgtggcaaattttagcgtcgtactggcgctgagacgttggaccatagcaccaacgggattgacgctaagtccacggtctatttttagttgaagtttttgacgagggttagttttgaaataagttttcttaaagtaccaaattgtcaaaaaacggtggttgttaagagtgattatacgtatgaaaggtaaagttggtcgtagcatcacaaattagaataaaaaattgatactctctccattcctaaatatttgacaccgttgattttttagcacatgttcgaccgttcgtcttatttaaaaactatatatgtataaatataagtatatttaacaatgaattaaatgatagaaaaagaattaataattacttaaaatttttgaataaaacgagcagtctatttaaaaaaatcaacagcatcaaatatttagaaacggagagagtatttagctttggatatcacaaaaccgaattcaaaattgcgttaactttgggataactttccaaatgcaaacttaagtttagaattgtgggctttaccctagttagggagcccttccagaaattctctgaggcccggatgggccgcaaagggggtttggaaatagttttcaaccagcaattgacgcgcctcggtataacctcactagctgcgtcattgccccaagcgcaaagatgagttctaacgatcgctcacctcctcgttttatagcgccttccgcatctataattccccaacataatcggtatggtactaaacaagccaacaagaagtcaacaaccgaccttcgtaatcccaagagtattcctccccgttctttcgcggcccacggtctatataatcatgggcttttaattcggcccagttaggcaaatttgcctcccgtattatttttccttttttttttcttgatgaaatgaaatgtccccatttctaaactgcagcactgtgacccgattcgattcctttgttctccccttcactttgccccgatccgcacccaaaccctagccatctaaaacccccgcggctccgatggccgccgcctcgccaccggcctccccgcctcaccccaagcgccgcaagatgtcctcctcctccgaccccgaccaggagcccacctcgccttccgccgctggcgccgacggcgcgcagccccgcgccccccggtacaagcgtcgcaaggtggccatcctgctcggctactgcggcgcggggtaccagggcatgcagaagaacccgggcgcgcgcaccatcgagggggacctggaggaggcgctctaccgggccggcgccgtgcccgaggccgaccgcgccgcgccccgccgctacgactgggcccgcgcggcgcgcaccgacaagggcgtcagcgccgcggcgcaggtcgtctccggccgcttctacgtcgacccgcccgtcttcactgatcgcctgaatgcgcagctcgcgccccagatccgcgccttcggctacgtccgcgtcaccaactcgttcaacgcgaagaagttctgcgaccgccggaggtatgtgtacctgctgcccgtgttcgcgctcgaccccagcgcgcaccccgaccgtgaggccgtcatggcgagcgttgggagtgggagcgagcttacgaagtgccttgagtgctcagagaggggtaggaaggtgcccggtgtcatgggccgggagggtaaggtacccgatcctgcccttcaggaggagaaatctgttgaggcttcccgggaggaagctgcagtgggttcaaatgaggatgcaaattgtgatcctgcaagcactggcgatcgtagtgttgatttacctatccctgataatgaaaccaatacccaaatcactgaaatgagatcaaatggtgcagaaaaatgtgatgttcaactgtcaggtggtactctctgttctgaagctgtaccagctagcaatagtgagactgtttgccccatcctgaattcagattccaacacgaattcagattcagttgatgttgatccttcatttgtggctgaaaagaaaggtagtattgagactgttgttactgaagatggaaagaaacaagctatggatgttgttactgaagatgaaaagaaacaagatgtggattatgaaggcagcagtctagaagagatgcccctgagaagtgcattttcttacactcatgaagtcaaagagaggtttaatagaattctcaaaaaatatgttggaacacacaatttccacaacttcaccaccagaactaaagcggaggatcctgcagccaaaaggttcatcatttcctttgctgctgatcgtgtagtgaatttggatgggattgattttatcaggtgcgaggttgttgggcagagtttcatgctccatcagattaggaagatgattggccttgctgttgctgtgatgaggaactgtgctcctgagtcaatctatgatgtagcgttccgcaagtaagttccatacaagagtactgcagttttatatagttcaacagatattatttgcatgctaattgatttcttttatcatgtttctgttacagggatgtcaatcttaatgtgcctactgcgcctgaggttgggctgtacttagatgaatgcatgttcacttcatataacaagaaatggaaggattcacatgaggcggtttctatggaaccttattctgaggaggctgaagagtttaagctcaagtatatattccctcatatcgctgcaatggagcacaaggagggagctgtagctctctggttgcattcgttgaacagcagaaattatccagattttcgctacatggataatgctggaactgaggcaagtattgctgctgcagttgagagtgttgatgaagggacggtgccaagtgataatattagtgagtgactcttttcccaaaggaacttgtaggacacagtacttctgtctgttgtatgtgtctggagagaggctttgaaatattgcttatggaaccaagactggattgaaggctgcatctctttttcattgatatacgggcataaatagtcaagttgtgtaatgcttcagcgcttacataggcagtgtttccttggatggacattatttttttccggataagaatgttataaatttgatatatgttacttatttggaggcagtgtcatggcaagttatgacgcctgagaaatgcttctgcaatgtttgtttgctgaaactatcctaaatggttactatgctttataactttctatatgtttcttgttgcttccatccatttcattctagctagaacttgttctatgctatcccattgtgcttctggtcaatattggacattgggaaatggttgactcatttcattgttaggatgtttttatttgctttcttatctatatcagtatacatagttatgcttggttgcatttctccccgtggaatttgaccatgaagaaatacttagatgaggtttttacacttctgtaataaggcaattgcattttttttccaaacataaaactataagagttttttttaacacgttatctctccaagtagtcctttgcttacagtttcatttgttaaaaggttgacagcgaggataattgagaatttaccactccacgatagttaaaaatggcaaatgaggacctgcgaattactgcactggttgatttgttaagttggattttgatttctctaccctatgctgataagatctgtgtggaagctgcaacgagggaagcatttcaaactgtttctctttattatctcttttacttccacaaatactactattttgtacagatggaacgaagaacaacagggcctgcaaactacgacagtgcggcagtgccttcgctagctacgaatataggaccggggcgaggccagctacggatgctacagtcgagcggccaccacgattacgagatgcaccggagcgagtgcagggacgccgaggtgtccatggacgcggcgtcgaacatgcaccggcggtcagtagcctcgatgccgtagtccatgagcgggcggcgctcgagctcctcgtcatgccggcgcgcgcattccgggacctccatctcccccttgctcacgtgctcccacaggtactcgagcctgctcatgtacctcagcttctcgtacagcctgcaagatccaaaattccaaggaaaccacggtaaacaccagcgcctcacccacgaatcgtagtgcagcacacacggagtgattcgttgtatgtacatacccggagctgaagaggaatcgccccaaggtggcgaagaagaggcgggcctggaatcccgggtgcacgaagtacaccgcgcgcagccgctccttggccgcggcaggcagcgcctcgtacgccgcgcggatcgctgcgacgccggggaagttgtcgccgcggtcgacgagggagtggacgtacacgaccacgaactcccgctccccgatctccgggagcacgcgcctccgcacgtaccccctcaacgccgcctccgcccgcccgcccagcgcgcgcgctgccgcgacaaaggaaacggggtcacttttccgccggcaaaagcatcggaattgcggggatctgacgagcgaggccgagctcagcttaccggggaagtacttgccgacgatcctgacgagggcgcggcctcgcttgtctcggccgttcagggtgatcgcccggctgcgctccagcagcagctccgcctcggccatcgcgtcgtccgtctcgtggatcagatcaaccatggcaatcgtcaatcgagcttatccaattcttgtgggggggcttagcttaaagcgagggagaatggggacattttaaatatatacgggggggcgatccatccgatcggggaggaattgacgtaggaggactggacggtgtggcgcggcgcgggggcgctgcgtgggctggttcctgggccgttgggtggagcgcgagcggtggcggacgcgtgggcgcgtggacggggttcatggggggaggccgggaggggggatgcgggatctcgggggaatatgctgggaatattttcggttgggatgggcacggtgggggtgggatggattggcgtggcgcggggtaggggaggcggccgcgtcgtcatccggtgggttttgggtgaccgatcccatggatggaaaacgggagcctttctgtgggcagggtcactgcttcaccgattggtttattgccgcctttgttgaagtccgttgtttgctgttggatagagctcattgtattagttcatgtgaaagttagtacaccaatattagtagctataaacttggttttttttttctcctatatctttctcatacttatgtatttcatgtatttatcatgaagggtagagagcattatttatcttgaagcatttaatatatttctctctccttcatacatacttaggctctcatcagttgcccatttggtccaaattggcttatttggcttattagaaaattaaaattaatttataagtaaaacttttgtagatttgttcgtagcgacttaaaagccaacattaacaaaaattacgttaaaagcattttaaaatcaacttcaaaaattcaaattttggcttattctttggttgtttaggccaaacgatggggctatcactattattcttgctcttacatcgacaataattttggttaatgcgcgtggcaactcaaaaatagccttttttaaaaaaaataattaaaaattattttttaaaaaaatatgcttgaattgtgattactgtactgttaccattatggtacccctaatacaagcttagttatatactttattcgtcctaaaatgtaataatatattcaaatgattgtgtgtgtctaattgtgtgttatattttaagatgatcgagtattgtatcgttatatttggagtatttccttattgggtcatcaatatacagtaatgttcagttctacacgagaaagaagaaatgcatattttgggaaaattcctatcagcactatggggcggagtaagtcactttacatccctcatcttaccatcgagttctaaactacaagacaaatcttaacccctaatttacaataccgatgtagaagaaatcctaaagcagtataggagtttcttttagccgatgttgcacctacgtagcatatagggcccacatgtcattaacatcgtcctctatccactctctcatatgttccccgttattcccctcggtggccacaatgaggtgggtgggaacaacgaggttctcgtcggtgttaacggcctcatcgccctactaacatctacccctccatgaccgctaaaagctgtggccgcctcctcccgagctccttccctttctgacggcggcgacagcccactccctcgtgtcgctctcatccacatcctttgggcgaggccgacaaagagcctcaacatgtgttgccgcctacgacgagtttgttgacaccgctggtacttggtagtgactgagctgtgcactgatcttaaggaatgtgtaggggagatatgaggatgcgacctagctgccacccctctattctccgccatcaccgagttagtggcttgatggttttaggcacggatgccgtggcattgtcgagctcaccgccattaagggtgccgtcgtcggtgtctgctgccgtgttcctggccgtccccgagacaccctgttaacgaccaaatttggtaatcgagttaagtagatctcacaggcctcgtatttttacatcaacacgcccccacctctcctcgccgccatggctacagcggtggtcgccacaaccccatcacgcctcctccaccacaccctgtgctcctattgctctgcacggccgtagctagcagtactctcctcctaatgcctcacggcctccccttagccacgcctctgaggtgcatgagcgtggtggtgacaacggcatggacgcactccctaatggtgtggtgcagcaatccatttgcatctcagtagtgtcagcgtctcccgccacctttgcggccatgtgtcgttacacccgacactctactccctacggggtgccttcgacgcggtgggtggagtggttgcaaccgatggcaccatcgggcggatggtagaggccgcaacgcggtattgtcccttctccgatgtgtgcctgcagcacgggctggctgagcggagcgcctaattgtgggtgctcaagccaataatggactccgccatgtcctcggcgacatcttgttggggatccaggcacgtggactagagcggctccccatgcgtcggtggggcgttgcggcacatctcaagagaaaaagaggggtagagagaagagtatgacatgtgggagccactttgtttttgtcacgtgaacgcctagttagcccaggtggaccgggtcaacttcccacctcactaaaaccagccatcgatattgtcggaggacctaatttaacccggtattataaattgaggagtaaagatgaaaagataggggatgttaactggacttatgccgcactatgccactatgtagagatttcacgggtatgggccacacattcttcagctcccgaacaaaggcaatcatagtcctttccaacaatttttggatcaggccccaagaaccatgttcccatcataggccgccgatttgttgcatgaaggttggatattgtttctccatttatgaacacgcctatgttgacaagatgaagatatttctaataaaatagcatatgttaaaatgaaactatttttccactgatctaagggtatttggttggttaccgtactttaccatgtcatattttagttatgcaatagcttcttatatatgtatttgtttcgttatcgcaactatgttatgccatacttttttagccttatgtcattctcttaaagttgaagctaagtatatcacacttgtgactaactatttttaagttgcacttatgccatcatgacacaactagttacggtaaggttaggcatcaaccaaacatccaaattactctcaaccaatcacagccaattgaattgaatttaactatttatatattttcttttcttaattattataacttttatccaatcattttaatatatatttttaatatctactcctatattagtgttaaaaatgcttatactttttggagggaggtagcaatgggtaggcttcgggaatctgtaatcagaagttacaccgagtcaccgacccgtggtcagagcttcagacgagtcacgtagcaatgggtaggcttcggaccattccatcccctcacccagttactggcgccccgtcaggccgtcagttaccactcaccaggctcatgagtgagcatcacccactccaatcctctcattgcaccatgtactgtaccgcaccaaattaaagtggatctcttaatcaaatgatgtcacggtggccgtgcggcatgcagcaatttcccccttgcaaatatggtgagccaacgatctcatcaccaaaggttcaccaaaccgatgtcgagacaagaattctcggttttcatgaaaacctacgacaaagcaatatcgatgattcgcgtggctaaaagctgaaacggtaacttcatagcaacaaaaagaaaatcaatgatagaagtgaaaactcatagtcgaattaaaattcaatttgaatttatttaaacttaatcagaaaactgcctattttatgctctcgatcctacttagccaatagttttcgtggtaatcaaccggctaccgttggtactgtaaaccctgcacatcactcatttgacgtggttgacgtgatgttaggactataaaaaatagcacgacaatgtataagtgagaactgtcctatctacttctattaaatcatgtttttagttgttgattaccgacgtttcatattatgctgctccgtcctaaaatataacaatttttagctatattttgggattcgtgtccagattcatagttaaaaattactatattttgggacggaggaagtaggttatttagcttatatttagtcaaaattatttaggtttgactaagtttatagaagatattagtaacatctacaatatcaaattaatttcattaaattttaatattcaatatattttgatacaacatttattttgtagtggaaatgttattatattttttaaaaacttggtcaaacttaaataaatttaacttaaaaaaattaaacaagttataatataaaacagagagagtgttatatatatgttatatcacatctaatattagattaacttattttagagggagtatgttgtaatactagcaaacaatactcagttgagatcggagtgggctgggacgatcagggaggcactaagatggatggagtgtctacaacaggtgcaggtgcacaagataaagagagaatcaaacggagtagcgcataagctacctagattagtagtaagttcaggaatctgcggtgaatggttgttaagttctcctgcagaactcactgaactactcaacctagaatgtaaccccaatttcagtcattaatatattctctcttttcaaaaaaaaaaaaagaaagaggttttgaccggatgtgtttcttttcccacgttttatcccgtgaaatgatcggtgtagctaaaattcctgtgtttttaattttatctcttcctgtgttccaaatacacatgaacaacaccaaaatcctgaaaatttctttaaaatgcaaccagagccctgaaaccttttcagactcctttggatcatggaattttggatagaaaaatagagaaattcaattcaaaggaaaatcagatacgcctatggtcaaatccacacggattaaccccgaatcagaaaatgttgactgaaattctacacgtatgacacgtaaaacaaaaccgctctatattaagttgagggggtaatttgtccggtattaaatgttcaaggtgaatatgtctgtttttttatattttttaggttcagaggagataattcggttgaccgtaagagttcgctaggagggggtaattcatacctttatttttttgaaaaaaaaaggcttgaatagaaacggttcactggatcggcgatgatcgctaccggcgcgcgcactagctggcatcgcgcgccttcgtctgacgccccgcggcaggcaagggaggcagtggcatcggcgcgtcgcgcgcgtcagtgcatgcagatgcagctagcgcggcctggcgcgcatcggcgcgtcggcatgcaccaccccgtgatgattaaccgggggctcgcgtcgcaccgacgactacggatcgaatagtcgcagactcgcagtggcctgcagtggcgttggcgcccgcgctccgctgcgacgggccggccggcgtggctaggatcaatgcgagacgtgatgggcttcccgctccgcatccagctgccttggaaatgatggatgcgtatgcctgccatggaggcgagaagacgatcaaaaaaccactttccgtcgtccattcattgctggaatggagtagccttttctcagctcatggcgttaccaccagtcagtacgagtacgactactggagtgccacctcccgtgcttctttttggctgattggtgtaatagttctacgcgattagtataatattcttgcctttttcttgtacgtactatacctcgtgtacgtacgtaaagtttgatggggaggagcatgcgtgtatgattgggattgctggcgttgtagccgggacgtactatgccagctgctgctagtaaactagcgagttaatagccttcagccacgagaagataacctttttggccttttctgcagtcctgtacgtacataatgataaccaacgtaacgtaacgttcctaatcgataaaaacagtcgaattggggttggattagcgggagccaatgagcatatatatgaaacatagtaaccctagttggtcatggtttaagactttaacctctctatactggagtacatggaggccggcatgcattcagtccggcgtgtacgttagtgcctccactgtgatagaccgatgcagcaagggcgtttgtacgtgtcaaacactggtctcgcgctcgcatcatcgtcatcatcagaagtccagacggggttggacaggcacagagatgcagcggtggccaggcagtccggccgcgtggagttgatgatgagttggtgagacggatccggagcaattcaatgcagattttcaatcgaggcacgcagcctcgatcggttcgcaagcatcgggtgtccgctgcatactggatttccgcggggatccgatggcaacagcggcggggcgccgggcggcgtggatggaatttatgggggtggggctgggaggcatcatcagtggcggtgcatcgggggacaaaagggaggaatttggagctgcatgccgcgctgcgcccactgcacgcacacgggccagagctatagcaacgaccactggtttttttttttacacccatccttctggtgcttcccgctgttagctcgctgctgctccgccatgatcatcgcgagcttggccgactcctctcgctcatcatcaaggccgtgatcgccaccctagtgcatccactgttgcatcggtcggtatcctaagacgaaggcatcatgggattctactgtggcattcatatccctgtgtggatgtgctgtagtataccaaactgctagtcaatggagcggcacggaggagtccttttggaactgttaccacagttgatagtggagctcggagaggaggcctgttgatagctaaggttctgtcaatggtgcgcaacaatcgcgctcaggcatgctctttgcttctctttgcagtgactctctcacacgctctctctcttatctcgctggtttggtttgtcgtcgttgatcgagttcacagttaaattttcgtgatattacgtccctatgatggatactggatagagtaaatgaacaagcagaaggacaaaaaccagtagttgtgcttttgtgcaacgccacttcagtacgtgagagaagtatgagaatatcttggttgggcttcagaccatatataacatgggtatagatttataatttgcacgttaaattacaatagttaaaaaaatattccatctaaaactgatgatttagatatatgaatttcaggagttatgaatacccagattaaagaaatattgaattcgaagttgtgtcaaccaagtcttaagaacgaatcaggcaatcagtaggtcatagaaatacaatcctatgtatagagttacaaagagaacgtaacatagttagttgtaacttatagttgaagtataacctatacttcatctgtcctaaaatagaataagtttcatcgttcaaactttatcccaaatataacaacctaatatttataaaactttatctactaaactatctgtctacccccttgattttattatagccctaactaatccgttcttctaccttaacaatccgaggagacaaccaaatgttttatctctcttgttaatacacgtaccaaaagttaaaacttgctataatttaagatggagtgagtactatatattcatgagtatcagttagcttaaaaaacaatactactacttaagtccattttttttaatttttgtctatctcacagatactctaatgcagttatctcctaccttttcaaactcaaatgcattcatttttgcaaagatgaagtttcttagacaaataaaatgacaaaaaacaaagtgtttgagggatggagggaatagatagctgtcggtctaggtagaattataagagcagtcccaacccatagtgtccataagcaatgtctatggtgctatgtcaataagacatcacaatagaaactacactctacaactcatggtttcttaaagtgggccattaataaatacatcatctctcttctctaccaatcataattattctttcacctattatgaaaacactattctcccccaatgcaaagcttgatagtgtctagtgcataggttctcgtgttgaagctgtgtcttgcatgagacccagtttcttcctctctttactctctctcttaattaatacagtgccacataaattaaaagtactacatagcaatgtagttaatgccatagacaccatactaagtggagggttgggactgccctaacaaacacttgttctatgaactactcgctctgtaaaaaaaatctttaattagatgtaacatattatagtacaataaatttggatgtaacctttcgtataatgaatctatacaagagcctatccagattcatagtattaatatatctcacacccaatcctagatttatttcgtgaaacagagagagtaaaacacttgttatgggtgatatgaactttgttctgctagctaactttttttttttggggggggggggggacttctctcccgcgcacgtgaaatagagtgattctttagcgcatgattagttaagtattaacttaaataattttaaaatttaattaatataaaattttaaagaagttttttttataaaatgttttagaaagaaatatattgtttaatagtttgagaaatgtggttagaaaaaacgagggagaaatgagagtatccttatcattgtaccgaaagaagaatcatgggttaagtactaatcatgttctaacatttgagcagccgtgcgtttaaatgggaaatattaaatgcggataaatgatggcagttttgttcacttgatcgtttttattttttctgctggcacttgccagcaggtccaaaccattgcagtttgcaaaagggaaagacacaattatgtgtggtggttgccgcaacactaatcaattttattgatcacgttggacacattgaaactacctataacgctagaaagagcacacctggaccagctctcctcaatcactcacaatttattttcttaatttttgcagtaaagataaaaattgtactaacactcatctgaatcagaatcctgccaaggcctacagccacaatggcaacgtgactttctcgccgtgattgccccacaggccacaggcccagctcacacgatggctcccaaaaatcacaagcccaattcatactgtaccatactccactgtagtaacacagtcctccgtactcttccagttttacttgggagtattttattatactgaactccatgtcccaaaggaaccatgtatccatgatctctacccccccccccccccttttggctgtagaatcaaggcggagacgaaagctgtgcagcgtagccccaaaaatctgtagccatgttgtagtttaatctgtaggtgcagagagactagagaggaaattaaagaagatcagattcatcaccactggtactcctagcgatgcttgcggctactcccaataccaaatccccctcagatctccacacacacacagagaccaagaagcacaatcccatctaaacctgatattctgatctgcccatcccccaaccccaagaatccctcacccaaggccggctacaaccctagcttggagcttcaccttaggctctataaatagagcactctgtaaagggtcactaccttattacagtgagactgtgggaatagtagtagctgcggctgtggatgcacagcttgggagaaaagcagtacaggtcatgtgggcttatcaaaggggcgcttactgagagttctttggcattctgtccacctccttgtcgaatcctcagagacagaaatctcatatctgttgatcttggaggtgggcatactgccaatggagctgtgtaggcctccctttgtaaaacccatatgactcaaaatcaagagagagagggtcttgttaattagatctgattagttctttggaaaccctaaccaagcctggttgattcttgccttatttatttggttcttttaattgtttgggggggggggctcttgttatcttggctgatttgtagagcaaagctacctccatatggcggttctttgatatcttctttttcggcgatctttgatttcctcacatcttgagtgcttcatgttgggaaagataaggccttcctccattttagcatccctctttctggatctatctttctcatctttgattattctaggggtatgttcttgaagaatctaatctctagttcttgatttgttgctgtttcgccatgcaggattggagaacatctcaataatcaccatcgtcaaacaagagaaaacatactagtactcagtacatactctcgctgaacttgtgagtggtactcgactcgatcctaacatgcatgcttcacttcgatcggttctctctgtgacctttcttggttagggtttgggttttgtgcctgtgactggtgatggtaatgatgagatgcggcattctttttctttgccttatcatttcctccctctgtacatgcatcgatctgctccgccttttcttctctcctgttccaatatatattttgctgtaaatatatgagcgcaagttgcgggcagaaatttcatgcgcttcatgatttcggtggcagaactcagcgtgcaccagtcaccagtgcacagtacagctgtctgtgcgtcaaattttgtttagatcggtcttttcatatttcaaatgcgaatgctcccggtcttgggggtatataggagtagatgatagtccatggcctgtgtcctctagatctccaagtagctttgcccaatacaggttaatcattacctgcttggagtacagtggaccattagctttatgtacagtatatagtatgtgctggtatatgacagtatactagtacatgttagtatagtgtatactcctatgattacttattatatattggtcacatatctgccattctacctcacgcaagaacatggaaacgtacgtgcaattgcaaatacatcctgtttcatcattattgtgtgcaatctcggttgcagttttttcagcagactgatactactatagcattttactgtaatttggagtctgaagtttgatcgtgacgacattgatcgattgcttgtgcctgttgctactacttttgtctttccaaatacagtgcaacattacataggccagtcatgttcttggtggcattcctatatgtatatatgtagtatcatctacaagtgattcaaacttgctgtatgataaccgaatgatgttatgcaaagttcatagcaatgttctcgatcaaaatagacatggagaagactgcagtatttacttgtatttttttgtaggatcatttacatcattttgttttagagtactgtctaagaattttgtgttattcggttattcatgaccagttgctactggatagcatgatatgttcatgtgagttttttctttgttgggctgtgtgcatctgatatatgcagatgatggggtgtaatttaatttcttaatgcttttcattatgtacaaaaaatatgcctgtgttcttcatgcacctgcatccatgaattaaaaaaatagtgcataaaaggttctagatatatgacaccaagtggtgttctatgcttctgttattgaattgattagcacacttaaacttgtaattgtttctaaatgacgattgagcagttatctctctttttttttctgttttttgtccactttcttagctagacagtttcagtaacctgattattgataattctaagtggtccagttttgttcagactggcttcaaaatatagtactctagtgtgcagtatcgttcgtattgtttgatcaccatatattgcgagttttgcattatgttacactcctttattatgtttttcttaaggatgactactaactttaccaaggtgaaccgaccctattgacatgctttgttctgtatcagctgctaggaagagcagtctggtggcacataactatttgggacatttaagaaaattttggtcaaactattaaaactttgccatcagttttatgttggactatgttttaacagtatattttccaagggaaatctatgcatactatttattttgtttttatgaacattggagagaagttatcgatgcttaaagttttaacagttttgttccaatcttttcttagacggtaaatatttatgtccagaagttgattatttcgttaattgtgtgctgtgatcccattgtctaattgtgtacgatcagatcccattgttcaacaggtttgtgattttgtctgaagttgacgtcatcatttatttccattatatgattacgtttatcaagtactcctgtggcgtgtagttttgctgaacctggacagcaaatttattttacctggccctcgttctgcaattgattctcaacagccacatttcatggtgtactttctctaattgaatcataacacctggcagtcactctcacgctagctgtgtttgtgacggcccgctgttactgtttgctccggcttgataataatcgtcactcgtcgttttggacacggtctcaaaaaaaaacaattctgattattattttttattataatatgtataaaaatgttaacaattatatgattttattaaagtactttaatctatatatgtagtcactatatttaaaagacaaatacttaaaaatgattcataataaaaaaatttgaagtttgaccttgtcttagagcctgtttggtacagctctaactcctaaatttagcttcaggagttgggactggagtggagttgtggagctgtctaaggccctatttgtttaggcttattgtttggctttttttttttgaagccataagccactctaacactattaagccaaaagctaggttggagaagctttttttggtttatgtgaggttgatgtatgacttcagcactaaacttaggacattaaatctaccggcttataaatcatataagccaataatttgacttaaaagtctaagccaataagcctaagcctaaacaaagagggcctaaacccagctccacaactctagttcattttgtgagagagctccacccaactccacttctagttttggtggagctgaaactgtttggctgagttccaactacaggaggtgtggagctcgagctcgagctgtgccaaacaggccctttgtctaaaacgacaattattattagttcggaaatagcagtaggttttgtctatcaagattaatttttagattggccgtcacatcatgtcatgcagtcctataatataagagattttgagtttttgactacaacgtttgaccacttgtcttattcaaattttttttgaaattattatttattttatttctgacttactcccttcgtcccaaaaaaaagacaaaccctgatttcggtgtccaacgtttgaccgtccgtcttatttaaaaaaatattaaaaaattaaaaagataagtcacgtataaagtattaatcatgttttatcatctaacaacaacgaaaataataattataaaataatttcatataagacggacagtcaaacgttggcacgggaacccacagtttgcttttttttttgggactaagggagtactttattatcaatattattttaagcataacttttcgttttttatatttgcaaaaaaattttgaataagacgagtggtgaaacgttacaagtaaaaactcaaaatctattatattgtgggacggagggagtattattcgagggacaacatcaagattcgttcaaaattaaatgcaaccatatgggatacataggaatttttaaatgatgtcatttaaggctctttcgtttcaatggaaattcataaaaattttagaggattttatttctataggaatttttcctatatagctatttgaatttaaatcctatgaaatcctatggattgcataatgccatacaagttttgaaggaattataacataagatagattctacctcatgaaaacttttctttgagtcttttatctctcctctagttcctatgtttttcgtacggtccaatcaaacaaccattcatgtgtttttctcgtgttttgcaatcctttgttttacacttacatttatatcaaaatgctgtgtttttcatattcctgcgttttctcaatcctgcgattcaaaggggccctttgcagcaattatatcatttaaaatcaaagtatttcaccctaaaaatcctcctatgaacgaagctttgctataaatgaaattccttggcagcaattatatcatttcaaagttatcgtaagtgtttttttagtgtttttttcagtgtattgaggttctttatttttttctattaattcttttattaatccaaaggagatctaaatattttggttgcatgcttgcggctgataagctatagcgcaagcgatggaagacctaattgcctatacacaagcgcactgcaaacagatcttgtggcttagttatgcacacaattaagcaatttcactctacccatgtatgatggcttgtttcacaattagcatttggatatgatttaaaataccatcccaggagaaagcattgcaagaagatgtgttgtgcggttgctatctaggactaggagtttccctgttctctcgtgtcgatcgagcaatgcatgcagagggtagggtgagagcgcccaacatgggaatcaaatcattatggccaccacggccaagattgaacagatactgtaaacaatgaaaaactggcagctttttcgtctatggtgcgtcgagtcaatgagggagatcaagcgtaggagtagctataccattgtgcagcaacactcacctgcaatatccaatccactaccgtgtcgggaatttaagctgcaattattatcctccgctgcccagagagaaagatgtgcatcgtgcaagcttgtagagcttgtaggagtactccgtatgcttggaaagggaagaagcactgcagcagtaatcctactgctgctggagaaatgcttgcccaacagcacaagggtcaattcatatcatgccaagagatcctttcgatgatggccgggagattttatgcccaaacaaggcaaccgggcggagcgtgagaggtggagagcgtatagtggcgcagcatcgagtggtagtagaagcaggctagcagcagcgatccatgcatgccgcgtcccaggacgcgcagccccacagttctgcatgcgccatgatgccgttctctatccctccatcgctcgcttgtccggcctcctccttttgatctcatcatcggcaactatagttacattgctgctcctacctagctagagtaggaggggagaagagatatcctgggcatgcatgcattgttggcttggctaggtgcttgtggaccttttccaagctgaaaaagctaaaagggttctctacttctctagcttggggattttgggatgttcttggcaggctttgcgggagaactgctggtagtgttgacatgccatggcaagggcgaaagcgatggcttgattcactgagcgccgtgtattgcatggattgtctgggcctagctaggttgcaacttttctagtagctggacagtggatttattgatcatctctctctctctctctctctctctctctctctctctctcttcttttttttttggcaagacaccaaggcaaagagatttatgctagctagctcatcacaataccaatgatcgagcacccacactcagggtatgtcttttttttagacggaggaagtatttactgtcataccgcagaaagaaattgtgggttccggccggtcatcatgcgtaattcaagtactccatattcaacacagcaagaggaacttgtagtcttgtagacagctttgtcagctgttgcagcagacgacacggataatgaagagggagacgggtatctaggggaagagacgaccagaactgacctgggcggagtgagtcctggtcctggtccatgagtagatggaagaggttagctagaggcagactgcgccaccccagccatctgctcggccaccggcccatcgtcgcgcccaccgcgtccttcgctcctcctccgccaccggccgccgcagccgtctccacatcgtcgtctcatgagagattgggtggtttcggaacggtgtaccgacgaacatgcgcagtgctccccgtaccctagtcatcgtgggccacttttgttagaacgactttagagaagcatgggcttaatgggccgcgtgggttgccctaggctgcagccgataggctttctgcagggtcacgctcggcctgtttctagtgggccatgtgtaaaaggttgggctgtccatggttttcgaaaggaaaaagtacaccaaaggtccctcaacttgtcatcgggataaaaaatgtcctcgaaccgcaaaaccagatataagaggtcccttaactatacaaaaccggccacagtagatccctcggcggtttagatcccggttttattctacgtggctgctgaatcagcgtgggccccacgtgtcagcctcctctttctttcccctcttctctcccttcctcttctccctctctcttctctggcttcttctctggctctgggcaggccggcgccggggcgaggcggggggggggggggggggagggggggaggtccggcgaggcgaggcgggagaggaggtccggcggccgacgacgtggcggcggcggcggcggcggcggcggcgaggggagcaaggtggattggctggagcgaggggagcaaggcggagctggtgggaggcatcgaaaccgtggacaccggcggcgacggcgccgtggttacgccagggagctgcggaggcgagggaagcattggattaagactcacgggaggcggaacggcggatgaaactggcgcttccggcggtggcgaaggcgccgtcgtacgcggcgatggcttggacggcgacgacaaggtgggcgagtagtcgatccaggcattcaccatcctaccattggtgagctcaaccctggcgccatcaagatcgacaacagcggcggacaccataatcccaagatccaatcccacacgattcccattcacatccccgaactgcacatccatggcaggagagcggcggcggcggcggcgctgggttcgttggcttcttggcgtcgacgtcttcgccgccgctgtcgtgccaagaaaacttgcgttttctccatggattcggcgtgctcgagctcgacgtcggcttccaagcgggaggatgcagcgaagttgacttggcgttgacagggatgaaagagatggactcgccggggccgacggggaggtttccgacctcgggcgtcggccatgagcttggtgcccttgaggaagaggtggaagtcaggggaaaccagcgcgagagtgaaggaggaacggagcgccgtcctgaggtcgctgacggtggcggaggcggcctcctcaccctcgccgccgccgatgccctcccctgctcccgcgttgtcgtcgtcgccgccgccttgctcccctgatcccgcgtcgtctccgctgccgccgccgccaagtcgccggacctcctcccccgcctctcgcggcctcgccccggcgccggtttgcccagagccagagaagagagagagaagaggaagggagagaatattggaaagaaagaggaggctgacatatggggcccacgtgggtcccatgctgactcagcagtcacgtaagacaaaactgggatcaaaaccgctaagagacctactgtgaccggttttgtatagttaagggacctcagatatctggttttgcggttcgaggacgttttttatcccgatgacaagttgagagactttcggtgtaatttttccttttcgaaaattcggttcagcgaaagaaaaggaaattagagagagagagagagatttatttttttccctgtaatcaaacaagtgccttcttgtcaatttaaaatcctttccgtgtataaagaaatctctgaattctgatacaaaaccacacgagaacagagagatctcccgtgtacatctctgcccacgaccgtggtggaaacgacctcaacttctaaccgagcaatcgtatggatccggccatagtttattattaggtggaagagatcaaatcacatcattacgtttgcaaactgccgaatagcttgaaatttctttttgggcgcaatcacagcagagccaattccctgacgttgacagggctgacgaaagtccggttgccggtgaagagcgtctgcgcggcgatggccgacgcagcctgcgtcgggtggttggcatcccagaacaggtggtcgtcgcggttgttgcacagcggcgcagtctcgtcgcacccgagcgctccaaacggccccgacccacagcacccggactccagctccgtgaaacctacagggacaaatcaagaatccatcgatcaggctcaaggtagactcacaccatcaagacaaagacattaacgtgtccatgggccgtttgattactccaggcgttcgtgcgcgggttggcgaagatgaaggagaccatggcgaaggagtcgctgagggagtaggccatgctgggcagctcgtcggcgaggtcccggagcgacgcggcgagcgtcgggtaggaccgcagcgagagggtgttgatcgggccgtagcatccgcgcgtgccatcctccgacagccggcgggcccgctgcgacggggtgcagcccagcggcgtgatgctgacgacgctgaacttcctcgcgcctagccggtacaacgccctcacgtaagacctgtacgccgcggcgaaacccagcagaaactcgcggtcgtcgccgttgccgccggacaaggagtactcgaacatgtcgttgctgccggtgctgatgaggaagatggacttggagaggagagtgttggttgttctcgagcctgacagcttctgcatcatcgccaccaccttcgagaagtactgcacttgctggaacatcgggattacatccccggccttcagaaaaacaagttcgtttcagcccgggcggcacggtcatacgtgtcacgtgtcatatggttcagaattttcagaataataacgtgtgttactgatttgttcaagttaaacaaaccccttggccggttttgtcaccgaggcctgatccgcctgatgcgaagttgatgcccttgtacatctgcgaaacgatggtcttcgctgtcagcgacaggtacgccggtgggctcattgggaagccgagctgctgagctgttcatcatcgaagcgtgccacgcggcacatgctggttagtcatctaaatagagggcaccatatattcatctgggatcgtacgcacctagctggtctgccaagttgtagccattgctgaaccggccggtcggcgtcgagccggtgaagtccacgccgtgcttggggtaattggctcgggcctgcttggtgatgttcaggtagttgttgttgcccacgtcaaccgtcgagtcgccgaacacgaagaccgcgggggcaagctgtgtcgcctccgccgcgaccccaagcaagcacaaagccaccagcacgtatgagaaactatggctgcccattggcacacctgctctctgctctctgctctcctcagcttcgggtgatggatgcttcagcctttgtgaccgtagatatatatacaagaatatgcaccagaaagaaatatactgtcgattctcgaatatgatcaccaaagcaccaacttgttaattcaattgccgtccacgtccattctgtattgctgttcattctctagcgcaatcaaacaaactggtgttttcaccctctgaagaattccatttggcctgcagatcggtaacctggagtggcagtggtgaagagccgagacggcgacttcaggacagatacacaactggcgcaagctgaggacataccaactgggaccaagaacggcatggccggcatatgtgtatgtacctacatgtttagagtttgtattccgatttggcaccaagtaagcagctgcgatgtccttggctcatccgctccaggctcaaattatcccgacttgggaacacaaacaccgcaaataccaacaagggcaacaataataacggagatgacattttggtatgtgtatccaaactacaccaccgcctaaagcacaagccactgatgaacacagcccagcatatcctacgcaccaatatcaccagacaaacagacacatagtcggcgacgtacaacaattagtagtactacgttacacggtgacactgccacgctctagctagtgctggtcatccaccagctgcctgaaatttatcggcgcagcgaagcggaccgagccgttgtatatggccgcggcggcgatcttggacgtggcgtgcgtcgggtgcagcaggtcccagaagaggtagtcgtgccggttgtcgcacagcgtggcgttcggcgtgcacccggactcgccgttgaacttgccggagccgcagcaagccgtcgtgacctccttgaatcctgcacaccaatgccgtgtcacgaaactctgaaccttgcgttggtcagaaatccgaaactgaagcgtagaatgttcagataccgagtcgttggggatgcttcatgatgctttgcaccacggcatgggagctcccgatggagtacttgaagccgctgaagctcacgctgaggccgtgcatggcgtccttgactcccttgttcaacccacgggccagctcgttgaggacgtcgatgcaagcgcccagcggttgcaggcttctcgggtaggggcagcacccgatcggcgggacgtcgatcacggcgaacttcctcgccccgagaacgtacagatcctgccgcgctcacgcgtcaactttcagttagattctttgtgtttcttcgccgtaaaattgtgtgatgagagacaagcgaaaggtggttttaccttgacatgatttgtgtagagcgatacgagattggtgacgaaccgctgcatctccgcggacgacggcgtgctgttcgcggagaagaaggcgaagatgtcgttgccgccggtgctgatcaggaacagggatctcgacagcacggtgtcagcggcttgctggctgatgcgtgctgagatgttgcgttgcacggcggcgaattgctgcacttgcttgctcattgggatgatggattgaccctgcacacacgtgtttcgtcgtcatcagccggtgttcagcgaaaaatcgtgcagtggctttgggtttatgccgacgtgcttactgttgagtcgagaatgcctgatcctgcagaggcaaagtttgttccctggagccccctgaacaatgggttgctggttttgttagccacggcgaggaacggtggggggctgcgcctgaatcccatgttaagagctgacagaggttgaagaatattgtgatcctcgagatatacaacaaaaatgcaagcgctactccgtgctcgtggcttacacattccccataataatactaactattagagcaagtttaatagtatagccaactactagcttcaatttatttatagccaatctaatagctcattcatacaatagttacttataagtatatactacaccattaatatatggtcccacctctcatatgcacaatgtattatagtccatgctgcaactggctacaagtttatagcccgtcttctttatctctcttctcttctcttctccatatgtgcttacaactgacttgtaccctgctattgtactcgctcttactactatagaagcaatgatcccgataaagcctaactaacatgaaaccattattcatccatatgtcaaacctttactgatcaatctctaactgttggagaagcattatagattggaattcgatatttaaccattcctgatcggaaaagttagcgacatgtaagcaatggttctcagctgagaaacattacatatcaggcaagaagagtacatgacgaaaacaccttccttctccctctaggccacaacaccatccttctatttaatgcatggccaaggcccttcttggtctcttccatggccaatgagcctaggtccgccatgcttcttgccctaccctccccaccagtgaccaaacccctcatgtcaaaatatataatgaacgacatacgctttgagaaagtccttttagcacctaggctagccaccgcaggtttggtgaggaaaacaataccatgagaagaaaatatagtacgcatcgcgaaaacgattatgctacagacgcgctaagcgcaactacatttagatgtagaaaaaccgcatctagacaacataaaaaaaaggaaaaacacctataatattattgtaataggatcttcgagatcgactcggaacaaagcgaaatgtgtgtgtattgtattcatcatacctgaaatcttaagatgctatcacattggaaaatatatatatatatatataatagttacaaatattaattttattatcgatgttgatgtttcgcgtacgattaaatctttattttcttttataaggcatttgccagcaaaaaatgtatttgaatttttcaaatacgtgcgctgctcacattatcgtattttggcattatctcccaatctccatcccaaacagtcccaacgcttaaaaaggcgatcgcatgacctcgatgttggaccgtacgtcagatcgtgtctgctgtagatttgtcatgtgtgccgtagattttggtaccaattcggacatgcaatgagtgcgtggtggcccggatcaaggctagtacatgcaagcgggtcagccatttatgtgcgacaagcgccaagtctcgagtgatcggtccattcagccgcgcccgcctgccaacagccggacactgccactctttgcaagcatcgcttcccaaagcctgtgtgcctgcgccccgtgcggaagtggagcagcagcgaattaaatttgaaaaatactgttcattcaattttatttttaaaaatatttaggatgtaatttatttttatagaaatatacagtcgatctcatacaaccgaaaataaaaataatataggggtgacatcaacgacggtatcgtggggcgaccgcacgaccgcgcgctgtcgcaggaatgacgagcggtctcgctcatgcagagagcgacaccatcccaaactccatttggttagtgactaatgatctaattaactatttaactaataataattaatgattacttaataattgctaatcataataattaatcactaattaaccattttgaaatctggtatcgttctttcatttcgcaagaccgcgcagtctcgcgcgataccgcccgcgaagtcgcaccacctcacattcgcataatgattgtgcaagatcaacggtataatttttttaaaaaataaatctcgaatatttctaaaaataaaatgaattaacaatatattttcaaatttaattcgggcagcaacgagccaactatcgatttaagcataggcgacctctggaatgtgtgcgccacagtggcacactgccctggcgttgcgcacttcacagttctgaagtatggggttcttcttcaaaacattttttatgttctatttactccctctcaaaatattgttatattaagataagatatgatccataaaacaaaaacaaatctaaacatactctccgtagtttttttttttacaaaggtagtatggcacaacctttgttggttttttttgggacggagggagtatgcgacaatctctccgttttcaaagcaatttccacttcttgccttcggtaattggaccgcggaaatagtatagagacgaagacttaatcgtctccagtcttcacccctactcaactctagcaccgttacaaaacttgcaatgccgaagttgacaaaaaacatgcagaaaaaacgaaacaatcaccggctatatacgtggttgtcagatatgcaacgatgccagccgctactataccgcgaagtgccgaagtatactcgcatcgcatggcaagcagagtcgcgaggcaatacagcacaggaaagacgggcggcgaagctgtacgtacccaagaagtcgacgccgttgtacccgttgctgaaccggccggtgggccgcgacgtggggaagtcaatgccgttgtgcgggaagtttgcccgcggcacggcggcgccggtcaggtagttgttgttgccgacatcggccgtggagtcgccgaacacgtatatcgccggcaccttcgccgccgccgccgcggtgatacagatggccacagcaacaagcgcaatcggcggtagcatctgtccagccatgccggactgcgaggtgcagtccgctggctctgggtgggggctgaacggcaaacctatcccttgtttgcttttgggaaagggaggggccgcgaccggagcggcaatggcgcactttaaagggcgacgatggcgagctgcgtacggccaacgccttttattgagaccggcaaggcgtggcacagcacttagaccaagtagtagtacaaagttctttacttggcttagctttggtaaagagagatgtgaatgtgacctggtcacctggctatcgcgcaaaacgttgctcctcctcctgggttggtcatgggggtctcctggtcgaccaggagacagtctactactctcgtactcctacacgggaagagtaactggatatacagcgaagaaagtcgatcgatcaaggtatcctactatcctggctcctacatgtacttgtgacaaaaccaagaagatccctcagtctacttgtccagcaaaccccgtcaaatttactcgccacgatctcatgctccctggtggtcctacaggcgaattatatcggcatgatgttctaagtgcctttggatactctgtctctcaagagtaattactgctacttttcacagaaaatcgatccccgggaggccgggactgagtgggggtaacttagcttgatcagaaccgattacttggatcaaccccgttgtccataggaacatattctaccaaccactcgatgcatttgtacaggcaggaaccttaacacgtctacaagccttgaagcatagagaaaggcagccggaatccaatgatacggtaattactttcgatgtttgcatttgataatgctccagtgggatgaataggcagccttatggctgggcacacaagtttgcgctggccgattcttctacgcttaaataagcacccaataattatatctttacgtttagttcttttcatactgtattgttcttaccatcacttacaactgaagctagcctgccagatgcacctttttttgcccaggcagaaaaagaagatcccatgcacagcatggctttttttcaatctttctcctgttgaaagcaacgaaaataaaacgacagcagtgggcagcgcaaccttttccttttgagactcgggcagtaagagcaggtacaatagcatgctataagccagctgcaaacatatttaaagaagataaataaagagagaagagcagtgggctacagatttgtagccagctgtagcacggactccaagacatagtgtgtgtatgacaggtgggaccaggtattaatattatagtatataactattgtataaatgagttattagattgactatagatgaattagagttagtagttggctatactattaaacttgctctaagagcacccgcaatgttaaagtaaggtgctatctataaaacatgtatctctcagcaatagactagattaatagtaaaccatctcaatagtatgtctacatgggtatctatagctctctaatacattgtctcgtttttctctgtatactatctccaggttagtagatagctttgttctctctcttcatttaatctctttcaagtaggaaaatatgttgatatggatctcttagagcctgtagataactatctctcttcatttaatctctttcaagtaggaaaatatgttgatatggatctcttagagcctatagataactattgtggatgccctaatcagtctccgctcactttcagatttttctgacagctgcacgaacaccttttcacccgtttaccgtgccactgcagaggttgaatgattgcatcacttcttttttttactgtgtgcaagtagctattctccaagacgtacgctagcgatatggtggttagtactcgtagtttaatcctttgatcgagttggcaccacgagtgcagagagtacttaagcgggatctttgcaaactctagtttattgcgcctttttttctccactccccaaaggcacataatcgtatccaccaacttggtactagaactctcgtctttttcatccttcctactagtagtactattttcaattctacgtgcaggccagagcactcgattcgttgatcacgcacgcgcgacaagcctcgacagtcgacaagtgcaccggcacacggtcgtacgatttccagtatgtctctctctgtatcttctcgcatctaggagtagagctctaggccgtcgtaggatcgcgtagaacatgggctgctttggcatcaacgtgaccatgaggcccaagagcgctggcacggacgaagttaccagccaccacgtcgttttctctcctctgttcctttgcgcgcgcgtgcgggagcgcgtgcaggctcgtgtaccgtgcggattccgtcgccaagaggtttggtacatgacacgctggggcgtgtgtttggttggcatgttctcaaacccgcattgctgcttgagcgcaagcgccaaagtgtacacgcttgttctgttcgcgtacgctgcaatatccgtctctcggagaggaggcccagatattgtcttctctctcacttctcgattacaaggcccatccaaagatggatggcccaagaaaatattacgccttgccaactgaaaagcccataagagtttcaaaagaagcccatgagaacaaggtccgccagtcaatccacgtaccagttggctcgcggtgtctgttactctcgtttcacactggcccgcaatgcacactaccaatgaaccaagagcggaccaatacatgaggcacatgattgagaagatctagtagaaaatgtgatcacaatgcagtgtaccccagtagagtagtacagtacaactgtacaaggcaacaatatattctgggcagaaatcattaataccaaggcagaatgcccagcccaaaaccaatacaagagtgccaataataattaaacaaactcaacatctagtacttgactatagcaaactgaagcccgtaccccacacgaaacacaaacttcgatcactgatcgggcttcgctgaccaggccttgaccaatcttgacacgaacttaacaaagctgcagtgcagaaaaagcaccaaactaacacacgccaaacacttccaaattccaaccatggcctggtctcacacacgccccaattaagcgctgctcttgtgctcgccggtggcggcggcggcggtcttgtcttcctcgccggagcccttgtggtaaccgggcagtttctccatgatcttgcccagtatacccttcttctccttcccatccgggctgctcacttcctctgtagccggcggtgggtgtgctggcgccggagtagtggcaggagcagccggtgaggcggccggcggcggcacagcagttgcgtcttccggcttcttgtggccgccgggcagcttctccttgatcttgtcgaggaagcccttcttctcctcctcgggtgcacgtggcagggtcgcctccgtcttggcgtgatcaccctcgatcttctccacggggacggcggtgtcgtggtggtgatcgccgtgagtcaccacgggagcaggagctggcgtgggcgcggccgtcaccacggatgcaggcggagccggcgcggggaagcccgtcgccgcgggcggaggagcatgctcaccggcatggtccttgtggccgggcagcttctccttgatcttctccttgagccccttcttcttcttcctcttgaccacctcgccgttgtcatcgatcacctcctcttcctcatcactcgactgttgcacacaacgattaaaggtcatgaaaccttctataattactaaaaagtctgtaactaattaaagctagatcatgcatgtgtgcacttaccgagctggagctggagctggatcggtgcagcttggagaggaggctctccttcttctcgccctcggcgtggtgctcctccttctttggctcttccacggagaccttctccatgccggtgacaagctcctcctcatgcttcttctcctccggctgatcgtccttcttcctgccaaggaggttgtcgaagaggcccctgtccttcacctccacctgctctgcagcctcgccaccctggtggctctccgtgttcctctcatcctccatgatcgatcgatggattcagctaaagcctctcgagaactaaagtaatcaaacaacagatcagcaagaactattcgctcttgacttgtttgagctgtgacgagtcgcttttgctttcggatgaagaaggtggcgaggcagatgccctccttatatagcggaggggatcgaaaggtgcggcgtttgtatcgtacgtacgcgtaggcgacgcgaggacaagaagcgtgggcgggaaatggcgacgagatggggggcaggcagaggcaggcagcgggtgagccagtggcgccgcgacgcgtgtcggcaatcgcgtggggcggccggctggttccgacgtggcggtgcctcgggacgggtggacgcatcgggagaggtcggcgccatgtggagccagacggccgtgtcaccgagggagaggaggcgtgggcggcgcgtccgcctctccgctccctctgcttcgaggcctcgacgcctacgcgacgagacacttggcttcgggcgtcgctgtccgtcaatttcctaatcgatttttggttaagtgatgagcggagcgatccatttaggaacagtaacgtaagcgtttcttgttcggatacgattcgtcttagtgcgcagcagtagcgatagattaacatcagtttttttccatcggattctcatccctttttcctctttatcggcatcatcgcggccaatttttcttctctcccagcagaggaaggaagagtctgtgatcgcttttgtgacgagttgggagcgggacacggctcgagagcgacggcaccgcgcgcgcggtgtctgattaggacgacgggagagatccagagacctggacggtgacatatggggtccgtagatcagggtcccactgatccgtctttcacagcctaacaaatcgggtcttggtttggttggtggatttggtcggacgggataagttatccctgttgatcacactgattaatttgccacccccagatcgagtcgtccggggcttctctaatttccagccagttcttttccttttatttttctttctttccttcgctttgatgatagctgatgatagctttcgtggggggaaatgtcggtggcatgtcggccttttgatttctttcgcccgtcctgtcctgcgaaacgcattggggccacactctagtctgtagtacgggtttagctcgagtcattattgactttcggtacacaagatgccgcccctaaccataagggcaaggtaatttggcgccgcgaaatcgtgacggccacgaagaactctctatggatccgttcttttccagcactgttctgacgtggaacggttgcgaaatcaaggaggacgacgtgttccaaccgttgcatctggtgtaccacgacgagcctctggcctcgcctcgtcgtggggactcgggcgagcctgcggataaactagtcggcgacatcggatcctgcccgatgtgcccgcgtcccacgtacggggggagcctggatgggcggcaggggcttcggcttttgtaccagcaagaggacacgggcgccaggaatcgattcagccgggaggcacgcgaggggcgcatcacttgatgccaggccacatgcccgcacagcgcaaatctgtactcgcctcgctacgagcttcagttcgggctcgtcccccggcgcacgaacctgtactaacctcgtagaagtacgttttgccgacttcgtgggggctaggggtagcaatttccccagtgggaccggggacccggcggggacccgcccctacaggggtgggggcgggtggaaattctaacccgcgggtgcggcagggcgggcccccgctaattttcgggggcgggggcggggactaaaaattacccgcggattacctgtgggccccgaagtatacaatacatagaaggtggcccattaaaaaaataatctgttactagcctgtttagttccgtgtacaccaagcccattataaagaaggccacatctagctcagttggtagcccaatttaatggatgtgtacaacaaagaaaaccctagatgaagtcacgactcatgagcagccgatgttttgatcgatccccaaattagctatctcaacgagaggtcgtgcgccgccagccgccaatgtcggcaccagggggaggtcacgcgccgccaaccacttcgcccctcgctccacgacccttttcacaggctcaacactagcagcagccgccatcgccgctaagccgccatgtcgcctcgctgctgcgtcgtttgcgtcatgccgtcttgtatcctcgtcgatcctcgcccaggcgttgccctgcagcgactcgacggcagctgttaccgtcccatccatcgtcgccacaagcaagtgtcggcggcctgcctccgcctccccaagccgacaccatcccagccacaaccgctcccaatcggtgttgcatcgtcgtcgtcctagctggcaccggccgctagccccgccatcgccgcccctagccagcactacattgttgttgtcgtccctagccagcgtcggcggccagccccaaccgtcgctccgtcgtcaccgccaacatctatccctgcccgggtgcttcgagtctccgctcacccggcgggtccccagcggggctggggaagggtggggttttccaccgtctagcaatgcggggctggggcgggggataaatgcagagagcgggggccgatcaatcacctgttgctagctcctgctcaaaatacggagtgcaccaccggcagattggccgcagcaacacgaatgccacgggaagaagtattgacgaggtaggccgaaacaagtggttaggatttcaattccaaaagaaataagtttattttccctccctccctcccaaaaagaaataaaatcgacactagccaccaccctactcacgctgtcgctctccacctaccatgtcttctaggcgtcgactacctgttctccctctttcctcctgccgtcctgcgagcgccggccaagccacggccgccacctacccgtgatcttcaagggaaacgaggaatcctcatcgaggatggagacggggtggcatagagccccaggaagacggataaagaggggccacattcccactctgctgcaatggcaacgaaatcagcaagaagccctcctccgaaggtggcactcctccactgcgagccgaagccaaagccaccacctcccaatctacacgcgaagggcccgaaggcagatccagcttcaccgtcacaccctccctgccatggccctccttgtcacgtgtggaactcatcgttggtgccttcccatctcgtccgaactgcgacagatggctattgtggccggcatcctccccatcccatgccacctcgtgatgtctaggctagtggtcggcaggagaggagcaaggcagcgatgacaatttctagagtagctcccggttgatcctaccccagctcccctacgagctcgctgatgtcggccactgtctaccttcctagagacctcagcggcagtggaggtcgatgggtccagcacggggagctatgtggacaccatccaccgccgatcgacctatccaagaaccgccttgccggccgcatcctcgacaaggtgttcgcgatgtagaaactcaacaagccgcttgtgcttgggaacacgctcttcgggacactcctttccaagtttcatcgactacgcatcactgatctgactccggtttggcgagaatcataaatagagataaagggtaaagagggggggtggggcgttattttttttctcactgacatgtgggatttatgagcaccatgtatgacgaaactgctatcaaaatggccaaggaagtcgatttgctctggttttttaagatcgggaatgcattgtactcgatattgcggttgagggagacaattcatcagcggcaagtgttgagggaggtaagacagacttattacttcgagaaatgcccttaggcttgtttagtatggtccaattgctggcccattcaggccttgtgcagacctatgggtaaacaggtcttgatctgggcattatcctcttgtgtcatcccgtacatgttaaaaaaaaggaaagaggggcatctgaacagtgtttcatccaaaattgtcccttacgcatttcctttcaaaaatcacgctccgatctataaaaaaagaaaaccacttttataatcttatcctcggtcctaaaatataagtagcttcaaagaaatatgagagaggagagaggaagatgacagagagaaagaagagtagggggttacatgagaaagaagaccatatgccctccacccctgccaagttcgtccagcattttttttccgttgacacgtggccactctattcgagatatcacaaaataaaaaaaaataaaaataaaaagaggctgtatatatctggttggatgtacaggctgggtaaaaattactcttctctaaaattaaaaaaaagagctatggtcgataagcatgtaaaaaattaaataaagcaataaaaaaattataataaatctttcacatatgtaatattaccgatttaaaagctaatgttagagaataggttatgaaaagtaactccaagatcaacttaaattaagtcttataatttaaaattcgactatgatttagagtactatttgatcactagcaagctctctctcgctccttttgtcttttttttatttaattcagttaactatatttgagatgctcatagcaggtgttctgaacttcattacacgttttttttatctgaagggcaggtttctcctaacaaatgactccttataaactctagttattttttttaacaaatactccatccgcttcttaatagatgacgatgatcaaacattattttaaaagtaaacaccatcatttattaaaaaatagagataatacttcttttagtgaaagtctggtgctctctactagtagtattatacaaacagtagaaatgatctgcaccgttatttcattagggtatgataagtacttttctatcattgaggtggccgctgacatgtggggtccacgtgagtcccacttatcacgtaaaccaaaaccagacactatactaacaagagattaaagttaacatggcactattagttacgggatggactatacctggtatttcgtgtgagagataaatttaaatttcagactcggcaacatattgaaagacctaaagtgaaattattctttcaataattagccattgatgcttgctcccccgggccgcgtgcagcccacaggtacacgtatagcccatttatgtatctacatttagcccgtttaaaaccgaggccattgccttttagccaaataaataatatgatggacaaaaaaatatagaaaaactttagacataaacactttatatgtaaaaaatacatttcatatagaaaaaatattgtacaaactttctgtgcacaatttttctacttacatataaaagttttgtatacgtgcaaaaatattctgtatattatttgaatttgtgtacaaactttacactggtggagaagtgctttttactaccggtttataaccctttgtagtcccggttttagtcctgggtgaaataaccggtagtaaaaatccatttttagtcccggttggtgttatcaaccgggactaaagatagagctaagctagctagatccggttactccattattctattctcttcttcattgtttttaatatattgatttcactccatccccatcccaaaatcccaaatcaatcatccccaaatccttgaatcctcaaatcgatcatatccaaatacatcacaaaatcttaaaaaaaaattacatcacaacttcgacaaaattcatcacaaatacatcacatattcacatcacacacaaatcaaatacatctcagatccgaatcacaaattctcaaaaaaaaaaagaaacgctcgctgccgctgctgcgctgcccgccgcgaggccgcccgccggagcatcgaccaccgccacgctgccgcgaggccgaccggccctctgcccgctggcgcgccgccgcaaagccgccggctgcccggccctccgtgctgcccgggcctccgcgctgcagatcaagaagtggggaggatgggagggaaaggaggagaggcgctgacgggcctctgcgttgcagatcaagaagtggggaggattggggagggaaaggaggagaggaagagataaggtgtacgtaaggagctagttagaggataggaggagccgggagtttaagggagagaaaggaggagaggaagagataaggtgtaaagagttagataggaggagccgggagttaaaggagagaggagcgggagggaggaggagacctcgatcctatccgcgcgcacgcctccctgtgcatatcgatcttttttcccggttagtgttaccaaccgggactacaaatagatctttagtctcggttggtaatactaaccgggactaaagaccaaaaagtacctttgagcttttaaaccgggactaaatagtcccggtttttaatacaaccgggactattgtgaaatctggccgaccgaccaaagatgatttctttaccagtgttatgtccaagcatacctttttcatgagcttcacccaaaaatggccttagagaatcggctcgttggttaatgtaaagtacatgactacattttcactcggaatagctctatttttttccctcatttttgttgttgattaaatcttctctctcaatcatacaatcgaatataatacatccctgtcttcaaaaactggtgcaaactgattggattgggaagtactttttgctgaagtaacaaactaaccgtgattgacccattgagtcaacatggggcaggtgtctagcttggatttgccgctcttagaaaaatataaaaaccgtagcgtcggttgaggaggagctctagcaggtgctagtcatggtcatccatcagcaccttagcgccgaaagagaggcagtagatgatgagctaagggacccaaggtctagtggcggtggcgatggtgagggtagtcagaggaggacgtaggctctagaggttgctctgcccaagccacgacggaggagagtgagttggctgctatgaggagtgaggcgtcgacgagattaatcagagtggggtgtgtggctctagaagtttcgctcgagccacgacgaaggaacacaagtaggccaccgccgaggagtgaggcggtggcaacttgagtactcgatgagtgggccccgagcacaagctcaaccattgtgctagatttggaaggagggaataacaagcggaggagaaactcgctgccgtcgagaagaaatattttgggtggtggccgtcgggttgcgttagcgttagggcccacccacacgatctgagccctgccgccctccgccaccattgatctcacccacccatcgatggtaggcaagatgcgacaagcgcgcagctatgcccgttggtgatgaagggaaacgatatgggctgagtcggtgcagagacggcctcaaggttgccgagaggcactgtgatggcccagaataattagagggaaaatagaaggaaaaaaatccactttgactctcttaattgtacgccgaatctaattcgtacccctcaactagaaaaccggataggacgactcccaaactattgaaaccagtgcaatttgacttcctcagcagttttggagggtagttttgctgatgtgtcgctgacgtggcagtgttgacccggtcttcgtcccacgtggcgcttacgtggcattagaatttaaaaaatatatgtgggacccatctatcattcacacacaaatatatattgtggggcccgacgtcgacggcggtggccttggcgagcatggagatggagcagctcatagcccgcttcaacgatgccgtcgctgtgcatagcaacaactagctgctgctggacgccgccgccacggcgccacacgcggcggtgggcatggagatgacggcgccggggcgcggtgatgatttggaggagctcatcgcccggctcgtcaacgtcaccgttgctgcgctgatgatttggcggcgctgttccactactgcggctcggcggtcgccgcgtgtggcatggcggggtaggcattccggctggtgcggtatcacccagtttttttaatgacaaataggtcccatggattttttttaattctaatgccacgtaggcgccacgtgggacgaagaccgggtcaacaccgccacatcagcactacatcagcaaaaccgtcctccaaaaccgccgagggagttaaattgcactgttttcaatagttcagtgagtcgtcctatccggttttctggttgaggggtacgaattagattcggcgtacaattaagggagtcaaagtggactttttctaaaatagaaaaacgagaaagaaataaagaaatgagcagagcaagaagcaaagtagagcagccgctgcctgccatactggggcttggcccattctcgaaaagtactccagctagcagctagctgcttgggctttgccggctaggagagcaattcaagtggtagtagcgcagcgagctgcagtagctggccttgggccatttagccactagcagcggtgctaggcagcaacagcagcaaggcagcagagcaaagtaagcagccgggcagcagcaaaagctcagtttcagttacttcagtagcacctcgcttgccaagagttaatggcaccaacttataaagatgagaaaattcatgaaatatcatcgacaagcattttaattctagaaatagcatcgacaaacataactttttaaaaataccatcgtacaaacctatttctcctagaaataccatcacagtcaacataccgtttagtccacactattagaatttttttttacaataataaccaaattgctctcactccaaattattctatcccaatccaccggtaaaggaaaaaaattatgaaaagataaaaacctaaacctaacccgatttaactctcttgatgggcgacgacggcgaggctgcgacgcggggttcccaggtggcggcgtggggctcccaggcagtggcgcgtcggccgcaggcgtccgcccgacggtcccaggcgtcggcgtgacgggctgcgaggaggtggcaggcaacgacacaggggcattatgaaataatttgattgatagcaaaataatgatgtccgtgaatttggaagctaacataaatatggatcaatgcaaaataatattgtgtgagcaaacaatacaaaatgatattgtgtgagcaaatggttgtctggagggtaagaatgtcttttcatacaacttaacgaagagttgttaacaaccgtttgactattatggtatttctgggagaaataggcttgtacgatgacatttttaggaagttgcgcttgtcgatggtatttcatggattttctctatacatatggatacccgataacctgaaactctggttcaatttttttacgtgaaccgaagaaagggttgacctatgatggtgtggaggaagaccatggaagggtgtcaagccttgagtttttcacagcgcatcaccgagcaccgtctcacctccttctccacacgtgcctacaatcttcgcttccgcctccactttgcttccaagtcttctttgagagaggaggtaaaagagaccgaggaagggatgaagcgtgatatgtgggtctcacatagtcacataagttgttttagttttttttttcaaactggtactgacaggtggctcccattaatattattatcattatttttgcgtctagtgccacataagcgttatccaaaccactttaatttagaggtaaattgacttggttttaagagtttttttaggagcacatagaaataaaagttatttacatgccaactgaaagggaaaaaaagagaaaggagacagggaacggaaaggagtaaaacatctaaagcctatcttgccacaacatttgacgaccacatactcttagctactgaaagggtcaattagccctttactgaaagggtcaattaggcctagagggggggtgaataggctaatttaaaaacttaaatgaagcggaagcaggaattttcggaactaggctggaattttcggaacttccgaaaatgcacagagcagcgaacacaggataaaaactctagatctagaagtctataacagggcaaacaaggcacaaacggcaactagaccaatagcggcacaagcaagcaaagctagaggagagggatgaagaaatatcaccaagatatagctcacaaagttgatcccgatgttcaaatccttgaggggattctactatccgttgaggagctcactaagagctgggtcttagctaaccctttcctcgataggttgcactaagcactcctccttccactaagaggtatctcttcccttgcgaagatgagatctggccttcacaaacttctcccggccaatcacaagtagatcggtggctcaggaacgactcctagccgtctaggagtcctcaacctccaagagtaaaagatgatgctaagaactcccggagatgatgcaagtgctcacaaatcttcatgaagagcacaagaagcacccacacaaactcaaatccacactcacacacacaccaaatccgaatctaacctgggtggagagacgaatcgagaaagcaaggctcaaaagactttgagagagaagcaagccaaggacacacaagattggaaatggaaccagcagccctcacaagtgaggggaggtgggtatttatacccacagcacaaatctgcccgttggagtgcaacaaaagagattttcggaacttccgaaaattccagatctgagaaaaatcgaagtcaacgcccattttaggaacttctgaaaattcttttcggatacttccgaaaatattcagaacccaaaataccttatgtggattttcggaacttccgaaaaatattttcggaaacttccgaaaatttccagaagcatatttggctcgcagacattttcggaacttccgaaaatttccataaggttcaaatcggttctgtgtattttcggaacttccgaaaatttccagaacacaccaataagagaaatgctttcaagaaaaatggattttgagcacacgcatcactccttatatgtctatgcatcatcccccataatagtacggctttcctacgacacaatgcaaggtaaaagatacaatataccatttgaacattgccgcattgcatcatgatgtagcattcacggggtatgcattgcattacaacatgtcgaggacatatcaaccttcacatttgcttgaataaaaatgttagtcctctctaatcgcattgtaatcaattatcaacatcattagaggcctagatgcactttcagctgctaaactccttgcgcgcagcaccaactcattggccaagcgccaaagtgccacattggcagtcatagttttcgccacctcatgccaaatttctgttgttggttgaacaccaaaattttcctttccttccagatcgtccatgctagaagagctgcaatggtgtcaaatcctcgtcgatgaaccttctcaacattcttccagatattacaaagccagaggtgaaaggagtcctcattcatcggcatgcagctcggttgcttgattgccatgaggaccaaggccgacgagattcacctaattttaagatcgaggaagcctttatatctgattttatgattgatttgagggacgcaaatcaaacccgacccacggttgaggggacttgttccttctcacgtaaaatatgtgtgcctatatgggccgagatcccgttgttggcttgttgccttgtgtgctgctcttgtactccctccgtcgcaggatataaagaatttttgagttggacacgattattaagaaagtaggtagaattaactagtaaaatgtatgtgggaaaagtgaatggtggtgggttgtgattggttgggaatggaatgttgatagagaagttgttatattttgggacggaggaagtagcattttgtcatacataaggggatctgtggctgtggattggtttttctgaaagaagcatgagatctgccatttccatgagatcacaccaaactttcccccccccccccccccaactcccaactttccatcacatcacattatatccaaaactttcctacacataaactcccaacttttttttaaactaccaactttttccaaacttcttctcaatttcaggaactaaacacagcctaagtaggaaagaaaacaatatttggtggaaacaataaagcatggaaaggtcttttaaggcctccagttcttcatcgtgagaccaggacgtgcagcgtggggaagctattacagagatctaataaaggcaagttgctgtggattgtgggggatgcttccctgattagtaatagttccaccatttttttcaaattaggtataattgattcctagtgagctggttttgtatagaagctttggtgggaaacccgaaaccgtctctacttgtgtcgaaaatgtacattggagacttggagttgtggcaataattttactcgtggtatttgacgtctggtgctgtcaggcacgtatgcaattctaactagtgctgtgtattagtgttctagatgtttttgtcaggtacctcattggccataatgttctttgcttttgctgagcttatatatcaccgtctgcctgcgttaaattttggtctgatgttaccggtgattaactggttgtcgcttggtagtcacagcaagtacctgcaagttaaacctacacaagtacaggacacaccggcctggagtggagtaggttgcagtttatgatccagcaaaagaagttacgggccggcttacggcacagtttgggtcggcataagatcatttattttgccatttctccctccggttccaatttctgttttgtcccctctgataaaaggagaagatatcagctccatgatgtaccgttctcttcacctagtagcaaaagataagcttaacaactcaggtgtggattacatacgttcacctagatcatattgcccgagtaaaagactcaagcatgacatatcagataacatgaggaatacaacttgccaacagagcagaacaggctgcttctagaaccaatcaaaagagatggtatggtactggagttcatcgacatgaagcagcattgtagggtttggacacttttgtttcagatgaaaacattaaacatacatttaagaaggtggcatcaaagggcacaccagtcgtatcttttttacacttctatgctgaaagctgtgagggtacaacagcagtcaaatctcctttttctcttttctttttcgcaggcaattcttttgcttttgcacttgcagttttggtcatgatcaggttccactccaccaggtaatggggcacaccgcatagctcaaggtctatacctaactaatgaacagtacggtgcttcataaattatttttcagtaaacattagtacaatgagcatggtcattagaaactctgacctgatccattcaaccgttttactaaaacaccaaaagaaaaagacggtatcaattagtttacttggactacttccatccacccaatgttcatagttagataattcagagatgacatcatatcagttgtatgatgaaagctgcgaggatattctgatattctaattctgaaggcatgcatgcatgtcaaacagatcaacctagcaagcatcaattagttcttttttgacaacaagcgacacattcatgtcacgcatataaacaacatatttatttttgtctaatatgctagtgcttctacagttctacccactagtcctgatcaattccatgactttcaattagaccacttggagaaagcatatacttttgtgaggtcgagagaagcaggctcgccacaaaagtcctggccacaacaaactccctcctaaatcaattggctcctaaatcaattggtaaaaaagaatcaaaatcaactatactacttaaatgcgccatgtttgcaggcgcaagcgggaacgggccaaatcagctcctcccttttgattcggagaatttcttggtagagatcgaccaactggtcatataaatcaatcacggtcacttaacacacaccgttccttttcagcttgcaaatctgaagtatggttgcccacctaaaaattcagtcagtattttgagacctagccttccacgatcgatctgcacgagtgtctgtttgtctctctactaaaatccacagtggaattaatatttctacacctcgcttgtctggttgagctaggtagctagctagtccaatatgattccaaaatgaagttgtactggttggctaccattgaatatttgactagatttatacagtagagtagtgtactactgatcaaattgggggctcccttggatgtcgatagcaacattagaactttagcccgcgtggcatcatatcaacaaagttggtacaccgtgccgtgcctacttatctaaaatggcatcacgtgttaattgtcttgaacagcaaccattgaaccatgccgaacccatgccaggttttctttctcgatgtactttttgacaagaaaccttcagctttgtcactattaagcatgcatgagcgagagcttggtgccaacttctagcagcttgtgagatgtgtcatgctgtccatgtgccccaatccatgcagcacgaatgcacgatcgatcgagcatgagggatgcatggcagtttctctcgttcgaagcatctagctatatccgtgtgaaggttccatgcatagccattctaacgacacgtgaaaaggcaagctgatgcactgaacgtagccagaggcggctgaggttgattttgactactggactggactaactcccctgatagagaggtcttgttgttgatagggttccagtctgaatcgtcgttggagtgaccgcacctaaaattcagtcgaaggatgaagacactgcgctatggtctcaagtgtcggctagacacactgcactggcatgtatttctacctaaatttatcgttcttaagaaaatatctcgagatatgtaaattttacactgaaatttttgatgcatgtatacataaaaaattataatatcttctactataatatattctcaaggtctcaaggataataaaatttcccttttctgccccacagttgttttttctccgactagcacagtcatgagtagtcgcttactcggttacaagttgtaattaaccacgtgatgagttagagtgaaatatctctcccgtgtttgatagtatagattaatctgtgttatccacatacgtaacgcaactactactacttcctgttttattattgcaacgcaactgctccactaccagtgaagtagtgtattcacttcgattactgacatgctccaccgtacatcagtgcattcacctctgtcattagctcattgtggcatcttgggtaacgccgaaagtagtggtactttggatcgtgaccaagtatcatcttttgacgaacttgaagttttggtgatggtacaacagcaattttccccctcttctgtgaaatatggaaatggtatgtgttccgttcaccacaactgttctggaagaaaaggcaccagtagtccagtacaacggtagatgcgaatcgacgaatcattcttctccatcagatttcatccaaaggcagggggtttatgatatctatctccaggccccatctgctccgcccgtcacggaacgcgaaaaagtttaaagcaccaaacccaacacaagtacactagctgcccaaagcacccccaaaagcacaaggattaaaatcagacaaaagctatgcgtgccaagcacgaccttgcgtcacggtggaatcgaatagaaccggtccagaaacccacaccattcttgggttctctccccacaacttgtggtcgcggtctactaccgtctactacgtactctcgcgcggccgtgcgccgtgacgacccatgaggccatgaccgcttccgccgcccacgccttcctcgagcgttccacgcttccaccccgaatcccacttcccccctcccatttaaaacgcgcccccctccccttcgccatccgcgcacaggttgcacaggttacccttcgcttgatcgatcccatcaaagagtgacggaggtggtggagtatggtggtcggcttccgccgcacgatctcgttccccgcgcccaaggcggcgacggccgcgaagggtgaggcctaccgcgtccggtcggcgagcctgccgtgccggttccatcctctggtggtccagcttgacgaggatgtggcgacgatgagggagctggtgggccgcctggcgtcggccgcgtcggcgggctccgtcgcgggggccgcggagcagctcgggcgggtgctggtgtcgctctccgagctgctccaccacccgcaggcgcaggagccgctccggcggctcgggcggtcgccgttcgcggagcgcctgctcgacaatttcctccgcctcgccgacgcgcacggcagcttcagggcggcgctcgtcgcgctctccgcgctccaggccgaggcccgcgccgcgctgcggcgcgaggacccggcgcgcctggcgtccgcggcccgcgcgctgcgccggtccgggcgagacctcccgcggatcgcctcctcggcgcgcgccgtggcggccaagccgccgcctccccctcccgcgggcctcccggccgacgggaccgccctcgccgccgccatcgccgacgcgaccgcggccgtcgcctcggcctcggccgcggtcttctccggcgtgtcgtccctctccatcgccgccgccacggcccgtgtcgaggtcgccgccacgccctgctggatgccctccccggcgagattcaccacaccatcggcgacgccaagacaccacatcatcaccaccaagccatcgtcgctgcgcatatggtgggtcgccgacctgatgcgctggatgtcgcgggcgaagcgccggtcagccagtaagcagcacgccgacagtgacgcctcctcctcctccacctcctccgccgccacggcgcggccccaacccaacgtcgccgtggacccggacgagagagaacggaaggcggcgttcgagcgcctggacaacctgggacggtgcatcgcggacgtggagagcatcggcgagaaggtgttccgcgctctggtgaacaccagagtctcactgctcaacattctgagcacaagcttctgatgaattcccaaccaaacatcactagaaacgcaaactcgatcgaattttgctactttgaaagacatctgtacataaaaatggggcctttttttaggcttttgataatcatagtactggcatgtttagagagctccatttcctttgtttcatcatcatcatcatcgtactactagcatactgctagtattcacatgggagccaaagcattagcttcaggataaagaatcaaagatcgttcagatactaacaaagagtggatctttttggtatactgctcaatcaccggtgattttcatactgttctacctgcgaaggatacggctgccgttatagtcgtcgctggctagctgttgcgcggttgaggcggctggctcccgatcgttggttgggttgggtcaggtcacgtggagtcgctgtagagccgtagaggtggagggatcgtggatttcgtggtggatgagatgagatcgggagacggggatctgcacttctgcaggcttttttccagcgcgatcggcaggggcggagcccgtgcgaggacgctcggtcgatcgatcgatgcttccgccaatcacgccgatcgggtgatctccgatggggctatggtgtgttgcggttgtttgtggcgtggccgtttttcgacgggttgcaaagtgtgtgttgttgcgtcggtgagagaagtttcgactccgcactccatttttccacggtgcagccgttgcagcacatactatccttttgacatgcaggggatggcgttctatgagataaaaccacgtgtgcaaaagggagcgttgagagttcattcctcatgtggtcgctctcgaggtagattgggcatgacatcagagctattgtgatcggtccagagcaagttttggtttgaggaatcttttgacttaggatcggcatatcttcgtttgcttctctaatcgatcacacgaccacctaacctgtgtgccagtgtcaggcaggtagaggactactggttttatctccttggcttcgaaatgcaatcgggacgtatagagctgcttgatctgacatccacaattattgacgcctgttcactttgatatcattttcaaccttatcaaattttggtaaagttacaaaaaaaagtggctacatttagtttcttgccaaattttggtaactatataagaaatcctgccaaatgctaaaatttagtaaggtttttttggcatcaaagtaaacatgtccttggtttgttggttgcaacgaaaaaggatccgaaaaatcatatatcgttgaattgatcagcgttagacggtgagaagcctgactaaggcccagtttagttacaaagtttttttttctaaactttcaacttttcatcacatcgaacctttaatacacacaacttttctatcacatcgtatcaatttcaaccaaactttcaaacttcagtgtgaactcaacacaacctaagaaaaaaaccccagcattgcatgtagcatgcgtatgtactacaactactaccctactactatgtcatcccctctatccttagaatcatgacttcagcttagaggtgccgtcaattatggtcgaaatgggcggtgctggtcctaccactcagacttgtttcattgacaactttcgtcatattgcattttaatacattctataaaatttacaaaaatttgtgatcaaaggagtatttgggagatgctattgaagggagtagttgtcatggccagatcacacgcatgtgttcgtatcccagctcctgctatttctacctcatttgatccattccatacctggccacctggggcatgcttaactggtgatgactcgaaacttggcaagcaaaagggccttgtccaactttgatgaacgcacgtacgctccacggctcgacagctgcaagccttgcaactcgcccccgattccgtgggacttgcttgccacggacgcgcgcggagaacgagaagccacggctactagccgcgcggcgcacggctcggcacggcgaacgagcgcgcccgtgcgctcggctggatcggattccgttccgtatggcaaatcctttgggtttccagtttccacgctttgcgtttgcgaacccgaagttcctggatccccggacgtggccatgtacggtatcgagttcgatcgcttgcagtcgcggtctgcttcgacgcgctttcgcgcggagcgagggccgcgaccgtgcggattcgagatctcgcgaccttctggaggtccaagcccgggagtccccgtggcgcttattttaggcggaaggaagctgccaagctgccacgcggtggtggcgctggaatacgaccacgcgagcgtgcagaaggagcgctggttggctgggtgcccgacaggatgcgtgccccctgttcccctggccgcggactacggtgactctctccagcgcaaagccgttgccttctcgtttcctaggaacagtgcagtcgacggctgtaccttggttgtccacaggctgcttccacagtgtgtcacagcttgtttattacaccagctgcttgtatattttacttgtccgtgctcgccaaggccatattccatatttgtatggactctggaggaatgcgcagctatttcgagctgggagcatgggtagtaaacagtgttatttgaaggtcaggtgatgacgtcgccttcctacggcaaatgcggcacctacggcgaccgcctactgtttagatagttgcgtcccttatctcttaatacttggctgcattgggatgcaaaattcttttaaggctatcttccaacggagcaagtttaataataaaactaagtattagagcacccacaatagtaaagcaagatgctctctataaaacatgtacatctcagcaatatgctagattaatagtaaatcacctcaatagtatgtctatatggatatctatagctctctaatccattgcctcgtttttctctatagactatctccaggttagtagatagctttactctctctctctctcttcatttaatctcttccatgtagaaaaatatgctgatatggatctcttgtagatagcctatagataaccattgcggttgcccttagcaagctcaaactaaaactaatatgatggtatgttagtttgtgtggaaagagaggaatgctaggatctttgagcaaaagtcacgctcagagatttatagagaaattagagatgagatttggtgtggagggaggccggtatttttagagaagttggctgagaacctccctgtcagccggccctatttgtttttcgttttattttctctacccccaaccccccacccccctacagtttaatgtcaattttgtaaaatttgtaacaattcctttcagccttaataaaattaggttggccatcccggcaaaaaactaaagctaacatgtatagcatactccctccatctacttttgatagtcatatttctaaatctgaaaaaaatatttttgataggcatatttcaattcaacaatctatcatcttaatgactttcttggttgtaatgcatgactcttcattcttccacacaagattggctatatgggcatcgagaaatgtaaatattaatgaatcgcttgtttacgaggaatgactggtaacatgtttaaatggatgataagtagaattacttatccttggtctgtgtgccaagataaaatacgactatcaaaagtagatagagggagtattagttactataaggttgtctctattttttttccctatctctttgtcttactcttacttattatataagtagtgcatttactgctagtacgagaactaacattgtttctccctttctttcacaaaagtttgtggttggttatatcctattattaaacttgctcagtgagagattgatacaacaatatccgcaaccccatcaggacatctctgaactctcaactgaaccgaaacaatgaatgtaaacaaggcaagactaggcattatgaatgtaacctccgattaatcaacagcaagttaatttcagacatgcataatagacagcatccgacagcagcgaatcatctccgcgcagcgcaagaagttactcctatacacatcacaaaacgagcatactgttgctgggtgggtcaggatgcgggaacaacagtaacactacagaatctttgcatagaaagttctcaaaaaaaatatttacatagaagatgcagttattgggtcacaccaatgcatgttgctcgccctggggactgatctggaccttttgaagcagtccgtctcttggatggtcaaaactgatcagtcaccggccaggttgactccataacggcgagagaggttcttgatatcattcatcacgtcactgtctagtatgcagtacttcttgtaaattccatcaagtaactcctgttgctgctttgctaggtccttgtcctcttccaatagattctggggaagggaacagccaaatgaaaatattttctcacatgctatctgaagatcaaagcatcgtcaacgcattatatatatgtaatttaacagcatcaagatatcaaaatactgtcctcaaactatcaaactagtgcaaacacaatgcttagacaacaccaatctggaatggccatgaaagttcctcaagcatatttacaattctagtaaggatgaacgcgggtcacttggtgtgtactcaaggagtaatccatgcccatccctaagatctaattggtccttagtcatgataaaggcagatcaaccattacaaaaatacatgtaggcattgattgattctccagaaagaaacatcctccataattagataattatattcatatgcgcaaaattctattcaggttgacattttctaggttccaattgtctatgcgctatcaaggagcctgcccccagttcccttgagcattcttctgagtgaattctgagctattgttctaccaacagtttcatagggagttaagcagaaaagtttgctgtttcatggtagtggacataaagcacaatacataagtcactcatccgaaaaaactcaaaagtcatccaacttacctttatgagtgccatattttctgtttcctgccttcttgcaaggagccgcagtttgttcattccttcatactctattccatcttcttgtttcacccactggaactctttcttgattccagggcgaggaggccgatccagaaacatttcatgctttgcatagatagctcttacaggccttggctttccaccgattatgaaagggaaattattcatcaagtcgatagcagccttagcttgtatttcatcatctagttccaccaacgcagcagaaggaatatcatatgggattgtgtaattaacaatgaagtccacattgacaacgcgtgcacactgggaaatagctgcttcaattactgagcttgtgacttgaggagaaaggtgatcgatatatatcgttctctttaccctctcctcaaaatcagcataccccttcttagcatcttcatcagattccatgggaaggccaaatctgtggtaaacagtaaatggaaaccgttattaagagtgccaaggtttcagtgcaaacaataagctctttttcaacttctgtttacccatgcaaaaacctcagaagaaattgatgattctattgacagggtgtcaaactgagcaatataatagatgcaagattttgtcctatcctgaacttgaaagggccatgctggaaaaaagaacttttcagcaattaagctgcagtgtcttctattcaatagagatttgcttagatgcggtgaagataagtttgtaaattattcatgaagaggctgcatgcaactcttttctgatattgttggatttagaaactccgtgaactggcaacgtacacaagcatgtggtgctccttggcaatagacacaaatcatgaatgatattacatcagagtatcagacctatatcagggacaacaaggaggattagggatcaaggacttaagaacacataacacagcgttactcttaaaactagcaaacaaggtactctcagcagaagatgatccaatggctatctggtttagagaaagatatctgcaaaacgcaatacagctaaaccccagagccagtgatacaccaacttggaaactcatccagtcgcaattccagattctaagctactcgacccaggtaaaacttggcaacggcaaaacaaccctcttttggaaagataagtggctatcccagcgcacatagagttcgctttcccagttttattctcttttgccctacacaaggattgcacggttgaatcgcaatacaggcacaattcctggcacatccagctccatccaaacctatcctaccaagcagagtcagagctgcatgaactgctgcaaatactgcaaaaccaccacccctacccagacaacacaaacgcaagagagttttcatacccggaacccaaagtctcaacagcaaatgcctatcggatgatgtccttccatgggtcactttggactccagcagattatatttggctccacaccatcccgcaaaattgcaaggttttcctctggctggcattcagagacagattaaacaccaaagccaatatggtcaacaaaaactggaacgaagaccccactgctctttgtgccctgcgctagaaacagctgaccacatcatcttaagatgcaagcaggccaatagcctttgggaaaaattgaatttactgcagctagccaacaactcagattctatctcaaccttcctccaggcaattatagcagaaatcaaactttgaaaggaattgagccaatttggtttgctgcttgcgcatatactctatggaaagcacgcaacaaccaggtgttcgaaagacaatttgacagtctacaacacattattcaacagatctcagacaccatgcacctctggagcctaaggaccaatgaaataaacagacaaaaaattcaatcctggtgctcacggctttcatagaagattgctcattgtacatatttatgtaaattctccctttttttctgttttggtctgttctgctttttgctctttttttctctctgataattcccgcacctaatatgtaatctgtaaacctcatttcttttaatgaaatgactataaggtagagcctgttctaccttcttccgtcaaaaaagacctatatcagggtagcatgcgccaaaaactaaaaacatcgcaatttcttcttctcggaaggaaaactcaccctagctcacttggtggaggtgtgggtgtacaccctaccacccaagttctacggttcggatcctcaaggcaaggcaaacttagtacttagagcataccgcaactcccaaatgacgcatacaacaacttccaaagcatgagcttttaacacgacagattaattcaccattatgtgactttctgtcatgcatatcacatgatacaatcggattaaggtgatagaggggaaaaaaaaaagaaatccaaactccgtgttttgtgggcaaccagggtcactcaagcagcactactacattgacttcacgacctaccaaaatttgccacacatgtgcgaatagagtttcacaccttccgtgggataggatgggaggaggagggaggcgaactcttcgccgatgtcgcccttgccaccgccggtgtctccaccgcctccttcctctatggcaccctacaacaatggggatcaacgctgccaaatcaggtgcttgtagacctaacggataagggagaaggagcacaggggagaaaaggaggcaccagtcgccgactcggaggggaggtcgccggtcgccgccggccggggttcccgggaagggaggaaaaggggaatgcggcgtcgtttgggttctcgtgagaagagtaagagacgctcaggattggcccaagcagaaaagcccacagaagcataccgccacaggtaacgtgtacgacttggggccagaattaggaaaaagtacaccgaaggtccctcaacttgtcagcgaaataaaaaacatcctcaaatcacaaaaccagatatgcggggtcccttaactatacaaaaccggtcgcaataggtccctcggctgataccggttttatcctatgtggcgctttgaccacggtcatcggtggctgagtcaccgtgggactcacgtgggcctcacgtgtcagcttgtccaggtcagcctactctctctttcctctcttctctccctttctcctctctctctctatctctctcactcttctctctggggttctgggcaggccagcgtcgccagccaacaggtgggaaggagagcaaggcggcggcgggggaacaaggcggcgacgacgcaggagcaagggaggggcgttggcgccgttgtcgtcgccgagcaccaccaccacctgcagggggcatggacatcgcgtcgaggatgagcagtggtgaaagggggagatggaattcgagaggcgaggggcgcgcgcgcaccgaggtggttcttccgcttcctggtctcgtgacggcgatcccccgccgcgatctcctcgatctccagccggacgctgccatcgccgtctcctgtggcctccgcgacgccgacctctgctctcggcgccgccgctcttccccgaggaggaggagcccaccgacgagaacgcactcgccttctcctgccagatctcccgcttcagtggttgcggcggcgagatcggctcctcctcctcctcttccttcctcggcggcggcgagatcggcttcacttcctcatcgacaactctaaggattcaagagcaaatgtaagaagcgtaaagaatgaggaaaaaatttggggataatttgaattcgaggtggcttctctccctacctggatttaaagaggaaagattcgaggtggctagcatctttgatggcatcgccggccgccggacctcctcctctcccacttctccccgccggcctctgtcagggagctcgacgccacgatgctcggttgaagctctctttccctctctcggcgccgtcgcacgcagggtggagctcgacgccgcgacgctcggtttgcccccgggctcaaccccatcctcatcggcgccgcaccaagtcgcgccacattgctgtcatcggccaccagacgaggagcaaagtgagagagagagaggaagggagagaagaggggaaagagattgtcctacgtggcatcctgacatgtgggacccacgtgggtcacacgctgactcagccgccacataggacaaatccgacgtcaatactgtcctgggatctcgggtgaccggttttgtatagttaagggaccccgcatatctggttttgcggttcgaggacatttttgtatctttgtgacaagttgagggaccttccgtgtactttttccccagaattagccatttcttaacatcttgggctttactatttgggcttatactattcgagcccactgcacgaagaaaaattagacctccaaaaatcccattgggttgtgactgaagaaaccttttcgtttatcttttatagagagaaactgaagaaacaagctgcagacttgcagagtctctcctccatagcgaggagcaaacacatcatgatttgctgaaaatctttccaacaccgatgtaccttgattcagaagcagtatgatttcttgggttacagcacatgcgcacagatcaattgcatttccgcaccaccatgatctaatcctaacggattagagcgctgctggtttgtagtagcttgttgcgatccattctcgcacaaacctgcactgttgcagccagctgcatgcggactcgtgagcatgcatgctactccagctctcgtagcctcacacgcacctacagtcgcatccaccacctggtgatcggaaaagccaattgtttacatcatttttctactgggccaggtgttcgcttaagcatgcagatgcagctcgtgctttcgtttgaaagaacagaatctctggaaggctggtggtcagccaccaaccggctcctccatcatgatccgcggatcagaggcaggcatggatgcgtccggttaatttttagggaggttcatgtgctaatcttggcttctggatacggcacagagctgcatattcttgtgtagcagaagcagtataaaatgtgtttgggttgcccacatgcatgcacacatgactcatgagagactgtcaaaagcacaatctgcatgactacttacatatggacgttcactcaatcactctctgcctgctgatggtgtacggctccgattcctgtatagagcgtatagtaccagaattccttttcttttctacaagggcatcgtcactttgtgcctctttgagcaactgttttggtgttggggtgagtgatttcgttgtgttctttgtgcattggctggcgtgcaaatcttgaccactacttccacaaaggttttttgcgagatccaattactactacagtactcctagctaggcactagatttcaatggctccaaggtcctgtttggttccatgggctaattattagcctccaccttttagctctaaattaccctataaggatctaaatatgtgggctaatttagggctaaagtgaattagacccctcaaaatattagcccctccaaggaatgctaatggggctaattttttgtggggaccatcaaaaagcagccatatctccctcaatctctcctctctctttactctctctccatcttttagccctcaattagcctatggatccaaacatattaccctaaactaatatttagcttaccaattcaagactaaacattggttctcaaaattagccctgggttaatcttccaaacagggcccaagcattccaatcccggtagcactagcgtagtagtgccctttacaagttgttgcagaaatgaagtagtccgtgcgagtgcgtgcgtgcgtgcttgcttgctcgttctgtgtgtgtggccggccattttatgtgtgtgtggccggacattgttgcaaggcatgggtactaagcttttcttctggggtatcctaagctcctaactgaaaattcgaagctgtcctagctagccagctgctgaaatatttactcgcagttgcagactaacagttcagagctgagctagctacggcagccagccacacatccggatccagcaacttttgccacaactttacagtcggaaaaacaaagataggaacgccaagagaggaaaaaagataaaggagtaaatacaagatcagccaggcaaggaaaagcagtaaagttcggtgtaatccgtggtgaaggctggcaatggcataagattcaaggcttcaaaagcacaggggcaaagaggtgcgaaagtatatgcgaatcagtacgtgacctgcacgatcgaggtgaggagcagccagcagcagcaagttttcactcgaggtgagacttgaccaaacgtactactgctgctgctgctgggctttactgtgatgtaaactgttagtaataaactgaacaaggcatggccactggatcagatgatggctactccaggaaggatgcaaaatgtctccccctctttgcagttgaagtttgactgcctcgtcgaatcaacggataagcaggcgatcctggccatggttaagtttcatctgccgaggtggtaaaaagccactagtagaatattaatccatgtccaaaatgtaccaaacatagattagtgagcttagcagtaaaaaagttagctgtcctagcttagaggtttgtgctgcaattaactaacgatttccaggtacacgtacgtgtgctgtatggtttagggcaataactataatgtaccatatattgcccctaaaagtgtcacattggattgagtgatgagatggatgagagaagtgaggagagagtagatgagccacccctaaatcaagaggcaacctccacacaaattttaaaaaatatgtgagaatattagacatattggtatttgtgtactagaggtgatacattgtatgagttaccttttagttcatgagtgaataaaataaataaatttagaggtggtagtcacatctatcatatcacttgccctaaatacaactccatagtctcccatacaataagagcataggcaataaaataattaagtggatatatatagacgtagttaaagttcgactagaagtgctagtcactagtaattaatttcacatgtaaatatgtgacaatagaacactggctctttagcgagtgatctttgttttaggtactggatttggtttttgaatgttcagaataactaatcaatgaaatttacctgacagaagaaaggatatcgaacgataacgtcgcagtccgcagcaaacacaagcatggtagttaatcattatatcagcttatcctagtgatgcaaaattccatgcctgacataatctggaatttacctgcattgatacctgacaaactcttgtataatactgcactcatatctgtgaagtaaaatttattagcgttggattccgccgttctggtatatttagaagcttcgaatccagaactgaccaccagttaaattattgccttccctatgttcttaggcacagcgccacagaatgtacactggagtgcttgcaagcatatgaaattatcagaaccagttcagatcatgaattttgtatgcttcactcacaaaaactccaaaacgaggattattgtatttgcgagagggtatggcaattgagggagatcttatttttaagaactcgagatgttgttaaaaaaaaactctagagcacttcgtcttgttggcaccttccttggttactctaggagatcgagtataactatagtaaaactggctacttggtagttgccccatgagacataaaaatcagacaatgttatacaattctttttgtacaactatcatcatacatttggccaaaattgacatacagtattatgttggagcatactaggtttttgtttagaccttataatttgctaggcaaaaaaggtgtacaatatcctaaagaaacaggagttggaattctcatcctacactagctgattctatcacttgatggacattctgtactgggtattccttgtctgactcacaatcatatggtctgtgtagacatggaactagtgtgtactcatcgcttcacccttatacatcattccttaagcatactgtactactatatgctatctcttcccttttcctttttctgaatctgaaaaactaaagccttcatctacctcttcctattaccctatacctagtcacctaggcctcaacatatcacttgtctttctcgaactagcttctgtgctatatagaaaggaaaagcgacaaaattcacgaacagtgatgttgtagtcctttttgtgcaatcttcatatttacagaacttaaccgctcgtcttctttgagcccggagaacatgcatttcacaaaataagctctaagggtgtttgggatgcaaaaatgcagagaattttactattctgaattataactaaccaactactaccttttgtactttgcgaattgtcttcttccacattctttacagatcgcaagtgccaactcactttgtcttcagtggactagtgaatttagaatcatggtataattgatcattgggcatatggtgttattacgttttcatttatgaattatcagggataactctaatggtttagccggtgtactgagaaaactaacccactttctaaaaaacatgaatattagagaatgatctaatatcaaataaatataaggagtgatactttgaacctaagccggctagcccaccatctcatggaactagctggaagactacaggtatttctcactaacccactttctcttttgtactataaacttggagatccgtactggaattaatctagtacaatattttacatattcttcacaatttgccttgcaaatgaattgtttcagttaagaactgaacatttcccgagcaacgaaaagattcaggcatttcgtatctttaattatacagatatccgagactcagaaatggaggctatgaaccttgtagtacgtacctctatcaaccaaccgtccctccctcctacactttttcatggaaggatcaatgctcattttggcttggatttcgtttgtaaacatgaaacttcaccaaatagttgccaattcaacaggaaaacatcgattttttttaactactgaaaacttccaaaaattagaaaaggttaatccttaaccataggatttccagtcccaaccacatcgtttgtattaaaagatgctgtattacatagaacccacgtgcttaacttcaaattattcgatctgcttcagaaaaaaaaaacgctactgctgatcacggacactaaaaccgtggtacggtctcctataacagaatgggaatcaagccaccaatcatacactgattaccgaattatgcactccattagacaccttaattttttcttgcaactggatttaaatatttaataatttatctccactgcccgtatagtatgagacttggatcggattggtcattactccatccgtttcacaacgtaagtcattctagcatttttcacattcatattaatgttaatgaatctagacatatatatctatctagattcattaacatcaatatgaatgtggaaaatactagaatgacttacactgtgaaacgaaagaagtaccatttttcctatgaaagaccaccactgtttacctgtggtttacgacatgtgtatgcatgtagacatgtactactcccccccctccccccaaaaaaaaagaaaggaaaagaaaagaaaacaaatgccaaaacgtcaccaggattacaagttgtgattttaaaatttaaaattgattcattataaggctgtctgtccgtataatacaacaaaattggcactagtttgcatgtagttttgctctgcatcagctcccaccacgtgaaactgtgaataactggggcatgcatgaactgagatttttctttttgcttccacttacacacaactctgcattacaatatctgaattcagaagaacaaagtgcatttgtaatctctcacagatgcatgttcaccgaagtatattgtccccgaagcacacactcttgtgactcactctctttagttaatttcaattgccattctctcgcttcggaatccgtgcagagaaatatggcaagtgtagaaagaaattgccagtgaacaggtaaaagccatggtcccagacagatcagagttgtaagtgacttatctacacatacgtgcatcacttcctttttgcatagcctatagccttgttttgagaattagacaagagttattttaagagctattttttagcataaggaaatagccctctaataaaatagtcctaaattgtttggattcaagggttattttgagagctatttagcctttaatgcaccttcccatgaagagagatagaaagaaaagacattttttcagtgggccccacccgaaatagccccaattagcactccttgggtggaatagtttttttatgtgttatttccaaatagctctcaactagctcactcttttgaatctttttgagctatttgggctatttgagggagggctaaaaagtattacttggatccaaatagggcatataagggcctgtttacttcgtgaaatgaaaatttttggatgtcacatcggatgtttgaccggatgtcagaaggggtttttggacacgaatgaaaaaactaattttataacttgcttagaaaccgcgagacgaatcttttgaacctaattaatccaccattagcatatgtgggttactgtagcacttatggctaatcatggactaattagactcaaaagattcgtctcacgatttcccctctaattgtgcaagtagtttttcttttaatctatatttaatgctccatgcatatatccaaagattcgatatgatatttttaggaaaaactttttgggaactaaacggggcctaagttgagtgcatgcgaggagggtactgttcactttgtttcccaaacacataggtgtacattgtacagtgaagaagagtggccttcttcctcctgtcactctctactgtagtgggagccatgctgagctgcttttcacataaccatgcccaaattataatctgtctacagtagtacaaccaaatcatggagtcttggttgtggccccaaatcaccaaagcagaatatacggtcaacttttttgtaactttttttctcccatcttagatggttgccaagtaaagttgaagagatacaataacgaagggaaacagtaaggatagctaatctggatggctttaaaaagatttcgttcagaagatctagtgcctatggagtgtgtgacagcttgtaaatgttgaaacctgagagaattatgcatagaaaaaaacctagcatcataagtgtcttcctagggtacgattgataccacaaatgccatcagtgtggcattgacttggacattttttttaaaaaaagggggagaaataaataattggctggtttgataaacatccatgttattttactttgtcacaaataataatccaagcagaaagaacctcagagataaataagtgatgaattcgctcatatcacatctcatttggggcaaaattttcgatttgagatgtgttactagtaggggcggatctacagtacaagcgtcggtgtcaggcgacaccgacgactttcggcaaaacctataacaaaactgcttttccatatgctataacactatgttttaagtataattagtatactatgacaccgataaacacgttatgacactaaataaccgattttctagatccatcactggttactagtacagtgtagtactgtatttagcaacagaaagtggcacacaaacactgacacgcatggttgagataaacagtggcaggagcccaggaaaggtaacctggctcagagaaacaggagaataaatgattgaaccaagaaaaccacaaaaaccatggacttgcagtgaaacccatagccccagcagacagtagttgatggaattaaagacaaaggcagaagtcacaggcaggccccatgcacattgagcaaaaggaagcccaagcaagtgccggaaaagatagggattggcctccaagtaaattctcgctacagtgttatctccctccgaagttgcaatgagatcttgttataattctctctggaatctctctggccatctccctcagatcttgctattcccaaagagattggcgtggtccaccagtccactctgaaatcgtgagacctgaatgtcaaaacgaaataatggaaagatcggaggaagaggataaagaatagggaaagagaagctgtcattggtgcatgatcatttcctcaggctcatcatggtggctaaccttttcatttcatccctttttaactatggctgtgcttagttcagcgtaaagtttggattttgattaaaattggagatgatgtgactgaaaatttgtatgtatatgataggttgactgaagttttgatccaaactttggatctaaacacagcctataataaatgcttgaaatccacgatcgttttttcagaaccaatctatttcctatcactatgcataaatctaaaatgcaagggatgatagttgttgaaatggcatgttcgacaaaagagctatgggacagaagacaagtgctaatgatagttgaaaaggtgaatgcaaggtttgaagaaataggatggtgttagtgcaagcaacacccatcgcacacttgcacgttcaattatacttgaaaaaagctacggtctagaaaaccttttagaattagtgtagctaacaacttaacgtgagttaactttcaccataattattatttaaaattgtaggtttaggtatatgaaaatgatatcggcaggtttgctataacaaaagatttcataaaattattagtacaaactattttaatatctttataaaaggatgaagttagaaccacggggctgtttatttgtgctacttgtggctgtgttacagctaccacaacaatatccacaatgaaaaataaactacgattatatagttgttgtggctgtgatgttgtaattagcacaatgatcagagcctatacctttattgtttttaaaagcctaaaataatatttctagactagtaattcgagttttcattaatagagtaccattaattaaccggtctcaatttatgaactaggaagcttgcgctcctgctcatgcgaaaaggaaaaaagaacgagggaaactgtgcgaaggcaaccgttcccacgggtaggatcacggccattgcacgttgttcatcccttagctggaatgttgcaagttgcaacacgaacacaactagaataaaacacaagtactctctctataaaaaaaacgttaacctaaaataaaatgagatatagtctagtgcaataataaatttagataaaaatgatgatattagattatgtcttattttagattggatttttttatgaacggagtacgccgctagccgcgaaccctgttcaccgcccgacgagcgacgattaccggtttccaacggacagccggccctcgctgtcttagtgtcgtcaaccctcaggcaacccactccgtcctccgtgttttggcgcctgcctgtgccgcactgcagcctacagcggcgcatgcagcgtgcgtctcgcactagaggagaggcttgctgtcgtctgatcggtttgatccgctgacgaggccggtcaagcccgtaccatccagcggtaagacggaccatcaagacgggcgggaggccgtcaatgccaccaccaaaccgaaccacaccccctgtgcaccgcaaccgcaaaccccctgctcctctgcatcgccaggcgccaccccattccgctcccttccaaaaggaaacggacaaaaccagtaaaaccacccgagtgtgtgcagcgtgagaggctacactagagctatagtgtgtgcgagaagggggagaaaaaagaacatggcctcgtgttgcctcctcgcctgtcccctccattccccgtcacattccccacactcgcgggcttgggtgcggggatagcgaactccggaactatagccatcggtcatccttgtatttttctcccctctcgctacaaaacagccgcggccctgccatatcaagcccagaaaaagaagcgtcgttgcgcgagtgcaaacaaatcaaccgggaagtgattcccccaacccaaccttccccctctctctctctctctctctctcacgcccatcatcatcagaaacccctccagtttagcagtagcgctcacccgcgtgcggtctccatccacatccaccctcttcttttcttggcgtttttggtggttgttgctatcatttcctcatcactccgctccgctccatgtcaccgtggcgaggaggccgacgcgccacgaccacgaggagaagttgttaaggtttttgtgttggagttgtgtgtgggtgtgtggcgatggggtgcaaggggtcgaagctggagcagcaggaggcggtggcgctgtgccgcgggagggccgacctgctggcggcggccgtgcggcaccggtacgcgctggcggaggcgcacgccgcgctggccgactcgctcgcgtcgatgtccgcgtcactgcacctcgtcctcgcgcccgcggtcgccgcggggacggccgtcgcgctgccctccgcgcgcaaggacgtggacgccgcggccgaggccgctgcctcgccgccgcactcgtcgtcgcacatcaacttcgcgccgtcctccggatccgagtcggggtccgtgtcctcctcgccgagccgccgcgtcgccgccggccacgagcaactctaccaaccgagcgcgctgccgttcccgcattatgcgtacggatacgggtacgcgcccgagccgccgttcgggtacccgccggggtcgctgcagctctactacgcgcggagccgcccgcccccgccgtccgtcgccgtcgagcagcgcgcccccgcgtcggagcgcgtctacttcggctcgttcgaaccggcgcagtatcacccctacggaggcgagaccaggagggcagacagggcggccgcgccaccgccgtcgccaccgagggcgagctcgtgggacttctttaatgtgttcgacaactatgaggtgtacgacaactactgctacgatgctcccggcaccggcgccacgacgccagcgccgtacacgccaagccggagctcccgggaggtgcgcgaggaggagggcatccctgagctggaggaggacgacgcggtcgtcaaggaggtttccagcgagtactccgcgcacgggagcggcggcgctcgcagccgacgcagctctatcggcggcgtgagcagcagcattgccgaagtcgacgaagaggagaatccagtcgtcgacaagggagtggtcggcggcggcgtggcgcggcaacagacgcctgcgcatggcaacgtcgccgcgtccgttccgactccccggagagccgccgatggtgcagacgttgccggcgagatcaaggcgcagtttgtccgagcggcggacgcggtcagggcgctcgcgccgattcttgaagtcgggaggcggagctaccatccccggagctcagtgtaccatggtgagctatctctgttctttgtataacctacgcatgcatctcccgattacctcgtgcctgatcattggagccattgtttgattgctgttcggaaacagtttcatctcggatggtgtcagtgattgcgctgccgcattcaggatacggaggcagcgacctgttggatgtcggaggaggggagaaggtggtgggagcaaggaacttgtctttgactctgcaaaagctctatatctgggagaagaagctgtacgacgaggtgaaggtatgtatttacagattgaaggtgcccaccttgttaagtaggagtagtaccctattttgctgtatgatgcagtatattttttcgacagtatgatgtagagatatgttggaatatgctagtagcatgttaaatgagatgagccctgagattgctcttcaaagtgttgtaggtcaggatgcaaaattgctgctcgctgagtggtcccatactcccatttgaaacaaccgagtacaggtcctgactagagagcaataccattcatttcactgtggcaagtttgcacagtgacaacgtccttaaccagtcaccaatagtcacgcctatgtagaaagatggatttgagatcttagcatggcattaggtgttttaaggctgaatcttgttgagatgttcatgcattatgtattgcccactcctcccaattccaacctactcatccccaaacaaaagcatacacccctaacagtgttggttattttagtactgttgcattgggtctatcttgaattaggtgtgctgcttgattaagaaaatggctcattgaatagcagagttgaaagtgcctttatggggacctaacagccagatttggaactgttcttttacttgctgtattctaagttatgcattttcttcataagcctattagtgagatttatttagtaagaacacttacgggttggtgccttttcctctaatggcaattttatcaagatgttgctgccatgcctttttaggttcccttgtagcataacaggacaatattatattttgttttcatatcattatcaccctacgtgtaaactaataatcctatgaggaacccatcaatgaagaattactgctcttacattggggaaatcatgttgtttgcttgagctcacccttggtagtctctattccgtattgaatgttttggtgctgttttcctcttccaggctgaagagaaaatgcggctcctgcttgccaagaactctaagaggctgaaattcttggatcaaaaaggcgctgaagctcccaagattgatgcaactcgtaatttggttaggaagctatcaacaaaaatacggatagctgtgcgagttattgctaaggtgtcgaaaaagataaacagagtaagggacgaggagttatggccacaagttaataccttaatccaagggtacactctattctttccctctgacatttattcaaatagtctgatttagctttgtctttacccattattttttttattttgtaatgtcagtccacatgtgtagtatgtctatcagaaagtaactgccttaattctgaaggtaattatgtaccagtgcactaaattgatctctgtagaaattgacacattttcataacaaaaatgatttatgcacatttaagttaatcaagttaaagcatcacaaacagtcatgtgtacgtctagaattgcttttttttttgggtactctatggcaaaagtgtatttgacgatacctatgttgtagaacaatcaagtggaatactgaacactccaaatttattttctagatattcttgcatttcatattatcttcaaatctagtttgtgtcaaaagaaaagtcttatagccatcttttacaggtttgtgaaaatgtggcaagataagctgaactgctaccacatccagtgtcaagcaatatcagaggcaaaaaacttggattcaataatttctggtggaaccagtcgagatctggcaatggagcttgaactagagttgattaaatggatcgtcaatttttcctcctgggtgaatgagcagaggagcttcatcaaggcactgaatggatggctggcactctgtcttaactatcagcaggaggagacggctgatggagttcctccgtattctcctggaagagtgggcgcaccccttgtgtttgtcatctgtaatagctggtcccaagctatggatcggatttctgagaaggaggtgattaccagcatgcaagctcttgtgtctagtgtacggagcctatgggagaaacaaaatgttgagcaaactgaacagctgattgcaatccgggaaagagaaaaatggaacaagatattggaaaggaagaccctggagattaacaaggaggccgacacactcaacagaaagctagctctagtaccgggccggcaaagccttcttccaacagcacaaacgtaccaggtccattttcttgaggcaaacagtgtgcaggttagtttgaagcgtgttcttgaagccctagaaagttactcttccaattccctgcgagctttggatgagaccctgaggcatgccgaagaggaaaggttgtctagagaaagagccaaagtttcataggcattggcatagaggttccatctgacactacagtgaacacagcttgtaaaatacaagggtctcctctccaggtggttataatttatcagatcaatgcagaatgttctgggcaaatgctgcttgcagatcaaatttttgtggggaagttctgactttggagttttgctaactgaccgttgtttgtcgatgcagttcaggcaaatgtcctgtgttgatccatcataatagatatagttgtgttgaagtagcaggtacattaggtacatataggtgaagtgctcgtttcggtgctagtatgcaatgtactgatcttctgtgttgcctttttcttggcctccatacaattgaatgaatgagcaagagtgcacttggaatgaatgtgcaactgtgcaagagttgaaagagttgaatgcagttcgtggcgttgtattgagtatttttccggtgcacttgaatgaatgtacaactgtgcaagagtggaaagagttgaatgcagttcgtggcgtagtattgagtatttttccggtttaatagggaggtatatactccctagtatattctagggagtacctcatggttacttctcatggagtacttcccaagagctataaaaattccagagagcaaaataaattctgctaacaaaattcaaaaatcagaaggaaaattgtccactgaaatcttgcctccctctctccttgcacaggcaaatgagtcatgcattcatctgatattttgacgaccgtgatgaaaccattatttctgttaagagattttttttctccaactttctgagggtttttgtattttgtaagtttggtgctgccgagtgcacatgaagtgtcctaccttggcgtacatccagttcgtgtcagcgactttcacgaaattacagagggagttgtgtacttgtgttctggtacaataccttgcacttctgtaaaggaactcaattacacttggccccttgaagcatggcacaatttgtggaattctgcacttacaatactctgaccgcacctatagatagaaaacgagaaaccatgtacagtatcaaacaatcaatcacacaagtagctaagcaatctacgggagctgtacgctagcaccaaaatttaccagcgagtcagcaacccagcttgtattccgtagctcctgtacaaaagaatatcatgatttcttgatttcccagcggcgtccccgtatgacatacccatctgatgtctggtcgctgccttcccaactgtccacaacaccagctgagcttacgtccctgcggtgccgttttcctctaccgatcccactgtcactagagctcccgcatatgagaggatcatcgatcccatggattgctctctgtggcgtggaggtactcacccaattgtcatcacggctttgcccgaacttgcccttcttcttcattaatttctcaaagcgcttcccgactggtcgcactgcttgcttcatcgtgaatttgagatcttttatcacctaaagataaagaaaaacacaaaacataataagaatattggcaaacacgtgcaaactaggtgaagcagataaaaaagaaatggtgaaacacagtgagaagcccacacctcggaggggtgaaagcagtagatatgagctctacgaagaaaatcttatgaagtgtaaaaaaataaaagaacagaatagatttaaatcttggtaggactagtttgcaagaactcacatattctccactgccaattacaaagtctcgaacactctctttaacatttgtcacaattatctcatctggttccaactgtggaagcctcaatttggtaggccgactaatatcttttatctcatcagggtccacagggtcagtggcggcatagtcccctagcactgaaatgttttcaggtgaacgatgattacctaatagcgaatagggctttgcagggaacacatataggtgaacaactgaagcaatacccatctgcgctggaaaaagaaatacactctgaggaaaacatgtatgaggagttgcccgcaggtgatataccgtaggtgaattcaacccaagaactctctttacagaaatgagcttgcaggttatgaaaaataaacgatattctttggaagcccgtctaactcggaaaggtgaggtacctctatacaaatgatgaaatcttgaatgcttgactttaactccaagctctgtgccaacggacttctaaccaagcccaaagaatacatgatagcaatcataataccctgccaccaagttaaaaatactatagatttgaacgaaagaaattttgccaatggctttatatgtgccaattcgtccttagtagccgtgtaccactccaccaaacagtatagggcccaatattgactgaagttaaggacagcggcaaagtatgggtatctgcagtttgaacaaaagcaatgaagttgaaaaaatggataagcatgcataaaataattcattgaagtggactgctagatgttcacatatattctggggataaagacaaggtgataacagcttatgcagtgacacaggtagagtcatcaagaagattgcattactcttctatgcagttatctgtctctgcattattcctattataaaatttttccaagcattatgaaattcaaattataaaggtgaatgccttttgctttgctgaactcaagacacaagaggtgaaaatggaaaattgtcttacccgcatctcaaattgaattctccatcacaatatgcaccaaaaggttgaagaatcagggataggctagctgtgagggtctttataatcacctgcacaggtacaaagtacttaaccaatatgctctcaaaatcataaattccatttcaactagctggacaagtggtcatacatattgaaatataccaaatttgataatctggtaaaacctcacacccattctccatggtttcaatatgtaattcacagggaagtgatggtgtatgatccctttttcagaagcaccatgcaaaagaggttccccagaatctccgccaccctccctcttcaaaaatgcaattgtcctttcttcaccacctatatacaaaatatatacattttttttcaaattaaataagagcgatagatggagagcttccaaattattaatgaaccggttccatatagtatttttatcatgttaatcctactttccttgtataaaaaagcaattaatgggaaaatatacatagggatgcattgtttgtttgtccaaggtgacatttttagtagttatacacaggttcattttattaagcctcttctctcgggtaaattccctcgaatagaatccttgataacaacgatactgttatctcaggaatttaggcagatagaatggtggatgcctttgcataaccttatcgaacaatagttccagttgttctggggtgaatatagactagctgtatacatggaaaacctgtatccagttatggaggtacatattatatataaaggaccataaatgaaatcatgcctcattccaatgccaaaggtctgtttctgttacttggtgtgttgaaaaatttatgaatgcccataaattggtcatcctgccaaagttttgcccaaattgaaagcacaataatatgtagctagtcattgacaaagtccatggggttagacaggccacaaaccaaacataacccaactacctgcattgttttaacatatccatccccacgttccctcaaaatgggaaaaaaagattggtgcatcatagcaacatcataaatgtgacagatctattgcaaaaagagtagaccgtagatcaatctttaactaaatgtataagtgcaagtagcaccctgagagtggcaatgaaagttagaatgtctaagaaaacagctcacctaaacaagcagtaatatatcttccaaagcaatacatagcaaatgcttcataggcgtcacgcaggatgccacagtacacgctagtgtcaggatttaccaatgaaacatactgttgcagaggagaagcaaagatcatcaaatacgcaactaaaatatctgaagagccctaatccaacaaaaaaaaacagaagttgctttggagatattaccgactcaactgcatagcaagggaccatcaagataacaccgagaacaaatttctgttcctggaaaaacacaaaaacgaaatggatattgtttgcagacatgacaaaccttagtattgataacatggtggagttccaaagcaaacctctggattgttgtatgctgaaaggtgctggaatatcaagtacatagagagggaaacagaaagcagcatgaagaaccctgaaattagtatggcccatgtgggtgctgcatattcggccatcaaaggcaggaagagcgcaggattgaccctcatgacagctggtaacacttccttgaagtccaataaacttataaggactcaacatcatatagtctccttaaccataaggcggagcatttcaattgaatgggcttggtatcatatacatataacccaatgctgccaccatatgaatcaaattcccaacccaaatagtttactatctgcaaggaaaatgtctaaataatgtaaatctaccaacagcacgaaatttcatatgagaattgggaaattgagtgactaatagaccaccctatttagagataacggtgaataattgagtatgtaaataaaatctccttgcctactccaacaggcctataggaataggagtgagcagaaatgtagaattacacagtgtgctgactaaacgaattcaccgttttaatagattcagttatgcaagaaaaacttctttcccccataaacacaatccaactaggcaactagtataggcaacgatagttgcacaaagtctagctaataaacccgctcacatattttttttctctgtccataaatccacgagcaactgaagataattctcacggctaatgcccttcataccataggcgcgaccaaaatccaccgctaaggcaaagttacagagcaatcagatggggttcgtctcgaattgaacaacccggcttgcggagctgaactcctaaaaacctaactaacacaaaatagatgacgcggttgcaatctaggttgggacggaatcgaattcgaaacaatcgaagagccttaggggaaaagccaaaagagagacacccacccaagctagggtggaatcgaaatcgagtacctgggcaggtgagcgcgaactggcgtgggcggcgtggccagttcgacgatcgccggagcagtttgggggtttgggggcggcggcgcggcggcgttcgtcgcgcgtcggcggtgtcgtgggccagccgaaacgcgaggagagtagatgcgctgacgtggcgtcgatagctttcacggctccagctggaaagttcgggagtaacacggcgtgtttagcgagaaaatctcttgattttctttttaaagaccaagaagaaaaccattgggaactcgttgagcatacatcaattgcttcacgcgaacgagaatcacgccttccaccgcgcgagcgatattcaactgtggcatatatttaggatgtagtgatgtagtactaccgaattaattgcttagttaagggtcatttgcgaatatgatgttgcgaaaaatatactaaaacataatgagccgtttaatgcgttttcagggaacttttattatctcctttgaaacatgaaacgcatgattaaaaaaacagagaaatagaaaataaaattgtaagtgtaaaatatagaactataaaataaaatataggaaaaatttaggaataattgcttgattagacagcaagaaaacatatatgaattagaggagatcaaaggaaactttccttggggttcaatctcatatttaaaattcctccaaaatatatacagatagaggcatttcttagaaatattgtaggattcaatagtatccatttttttttgaaagggtcatagaagaaaggcagaaaatgttatataatttaattcctacaaaatttagtgtttttccttcaaatcagggcaagctcaatatatatggtgtagcgtgaataacgatattgttagcaagatcttttacgtgcctggagcaatgaagccggtagcaccactgctatccatgaacaagctacagccaagcagagacttaaaaaaagaaaatcacaaagatttgtgctccttttgtttataaacttgtgtgtaagaactgagtttgttcgctcggaatttatgtggttgtatgtaccccattggtgtatagaagccaggttttataaattcctattatctaaaaagaaagaaaatcacaaatcttgaatgacacaaagtttatccttcaactagaacatcaattactgttaggctcattgtttggaggagctgagaaataaccggcgggtatccagttgagcgctgaagaagttacgtttattgtctaaattctatatatacttattgagaaccgagagtaaaatcaaagacaatttgagtactagagattctaggagtggagtagctgttgcggccagggttcaatattttggtttgaaattttaggaatcgcaacccccaaccccaaaaagatcgttaaaaaaaataaatttaatcaaaacttgtttaaatttcaagtttttaaggtcaaaattttcgggcaattcgggaaattttgtttctctggatgatcaaaagtatttttgatttgcaagatatagaactttggctgctactaaggctgcatttggtaccaccaattagaaacttgtctctcacgcacgtataacaaagcaagttattactccctccgtcccataatataaggtattttgatttttttcttgtattgtttgactactcgtattattcaaaaaattttggaattattatttttttgacttactttattatccaaagtactttaagcacaacttttcgttttttatatttgcacaaattcttcaaataagatgagtggtcaaacaatgcaaataaaaactcaaaatcacttatattatgggacggagggagtagcataagattaattaaatattagctaaaaactttttaaaataggataatatgatttttttaaaagcaatgttagtatataaaaattttataagagacgcatcgtattttagtaagcgtgcgaaaaaaataagagaaatgttatgggatgttccatacactcgcacgtactacaataattaggttttacgaagtccatgggcatggagtcatggacaacgtattcactaatcattgaaaagaacaggtgcgtgcatatgggaaaaaaaagaaaagagaaatagaaaactaaaaaaggatagagataataggaattattggtccatgtggtgtgtgccaacaataactcaattgatgatgtgtgcagcacaaggcatatgcgagcttcggttttttcaagagggttggcttagagaactatgtttgttgtaccgaagcacctcaaaatttttaagagaatacgtatacaacattcaacagaaaaccacacctaaaatctatcaaatgtaactatataatgtaatcaacaacatcaaacaatatttttttatcagcgttttagaaactatcgttttaaatgtccaaaaatactacgtagccaagatgctttattctgtttccactaagtatatatagtgtataaacatatcaatatatatttacatcattatcaacggcatccgcaagatgttaatttttccccctcatctagaaattacgctctatgtccatatggcacaccaaagatttctgtgtttctttcccgagaaatcggtcacatgaaaggattcaagtgttccgttcggacatcagggaagaacgatcgaggatcagaaaagaccaaagcatatggtgcagcaaaagcattgcgtatgcccacgatctgcagcagctgcaagcgccggtcgctcttacgctatctcactctcggagacgggtggccagcggccgggccagcccagtccgaccccggccgcggcgactggccgtaaccgtgcgcgccgccgccgccgccgccccgtgccgcgggacgcggggacgccgagccgggggcgccaccgccgctgccgcccctggacatggactcgatctcctcgaggacggcgacgacctccctcatggagggccggttcttgtggtcggcggcgaggcaccggagcgtgagctgcgccgcacgctgcgcgcccctggacgagtactgcccctcgaggcgcgggtccatgagccgagccagcttccggcggtcggacaggaatggcttggcccagtccaccaggtggtgctgcccgctgggccgcccggcgtcgagcgcgcggagccccgtcaggagctccagcagcacgacgccgaagccgtacacgtcgctcttcacgtacaggtggcccgtcgccacgtactccggcgccgcgtagccgtaggtgcccatcacgcgggtcgtcacgtggctgctgccgccggccggcccgtccttggcgagcccgaagtcggagagcttcgcgtggaattgctgcacgtacgcatgatcaatccgcgaggaaaaggagatgatcgagttagacgacggcgtgtactctggcgggaggcggcagcgtgcagggcgttaccgtgtcgaggaggatgttggaggccttgaagtctcggtagatgacgtgcttctccgacgagtggaggaacgccagcccgcgggccgcgccgatggcgatgcgcagccggaggctccacgacagcggctgctgaggcgacgcgcttccgccctctggttgacacaaaaagattgtcatttttcagctctcgttctaccgttcagttacagtgtgttcagaaaaattctggtttgattttccgatgccagctttgcaatccaataatgaagtaaattccattgtcattccaattccaacctggcaacccaattatatctatatatctatactcttcatatcaagctagcttttgatactctattcacctgtataaattatgcactatcagttgactctgttctcagaacatccactaatcccctctccatgtgaagcagaacaatgatctcaatttgtccccttgtgaccaccatcaggcatcgttaattagcagcccaagtcaagttgtcagctcttaataatcatggccataccgtcatggatctgaaagcaccatgaaaccttttgtcttaaagtttacttactgcgtggctcacttctgaagaggtggttctccaagctgccttgggccatgtactcgtacacaagcagtagctccttgtcctcccagcagtagcccagtagcctcaccaggttgggatgtgaaagtctccccagaaaattcacctcggactgcaaacaaattcgttaacgacacagtggaaaagccaaaaagaagaagagaaaaacaacagtcgcatcagcacccgacgtgccgaccactaaacatgcacactgcctactgacgaaccattgcatgaacattttaataccaacaagatcaacaccatttcttcatcaatcacaaggtggcatcccattttgtcagcgaagaaagatttgactcatgcatctcagattatgacgggaacgcgtccatgcgtcggggaactaaggaccaatcgtaatttatgcttcgcatgagaatgtgatgagatcaagagggctaaatcatttagtcgcggattctacaaagttattgttcttttgatcatggtttatttgacgaaaagaaatatcacgcacctgccattcttgcacgccctgtaagctctccggatcgagcttcttgacggcgacggccatgccggagccgctccgcgcggggctcatggtcctctcgtccacccaccccttgtgcacccgcccgaacccgccctcgccgaggacggtgtccgccttgaagttcctcgtggcggccctgagctcggcgaacgtgaagatccggaggttgggcgcctccaggatcctcccctccgcgctggcgtcgccgccggcgttcgtccggcctccaccaccagccaccgatcgcccgccgccggtgcttgtggctgtggcctggctcggcaacttaccagttggtggccgccctgggctcatcgcgacgcgtgcattgggctgcgcgatcgcgaccatgaccggtctcgccattgccgctgcaaaagagcaaaacccagcacacgaagtgcgtcagaactagagacgcagcaccaaaaccatgacaaaatggctttgttggttccagatcccgatgaacaaaataaatctcacgaatacaaagaaaacgtagtgatattgtaagcagagcatcgggatgtcgatattcatatatgtaccttgtggcagcgcatgacgggccatcaccttgacggcctccacctcgccgtcatcggagccgaagcaattccccatggcggacgcggccggcgagcagccaaacgagcagggaagcaccgggagcacttcctctctgtgagtctcttccccgagctataatggcttgtgtgcgtagatcatgtccttccagcgacgtgcttcgccatgtcttccgctcttcctctattaaaaaaggaggcggaaatgacctggacgtggtgtggaaggacgagacgaggcctggaggaaggctgctcctggctgggcgactggtcgactgtcatctgggaacccatgcatcaggggaggagcacatggcggcatggccgcatggcgcatatcgcggcaatatacatgttttgtggcacactggcacctcgtttcaaatttcatcagtgttcaaaaacattttgagtttctcaagattagaattttttttgcggggtcaagattataatattagatccattccaatgaaaaaagaatattagatccatttgcctattattgtacttatttttcaattttcttttgagaaacgcttgtttataatatgggatatttagcagaattgctaaccttcatttgacacaaatttgagttgaatatctgatgaatccttcaccattagatccttgtcactctttctccttgaaagccagcgagatagtggcgacttaagttaggatcccatattaagatcggggtaggaggagggaattcgccaaccttaaagagatggttaggtagtggaatgggctggcggcaaaattgccatagccgagtagtcggtaactagcagtgggccagtgatagcggatccaacagcaaatagacacaagagacgagaaaaaggtagggcgtgagaatatgatttggcaaattggcagcccttaggtagggcgtgagaatatgatttggcaaattggcagccctttgatttgcagtaggatcttgtggggtttatgatacccgggtattcgatagtagttctttggggctagatatgatggggcgggctgtcgacctccgattttataaatcggaaatcttatgtgtttatcagtaccaatccctgaatcagtagttggtacacacatacatagccgaatcacaacatatcacgaatgaatccaggctaagagagttaaatgcttacattagggccaggtaggccaacaactatcagagaacaacagcggaaaacaaaataatatctagcccgagacctagaatggaaccgcactccgatcagcttgttaggtacgcaagcgtactaacaagggcttctcttcaacactttgctaaaagatatatatagagcaacaatgagtacaaaagtactcagcaagccaccacacaaaatgcagtaatgtataggataatacaacgagtggctatggttactttgcgtaaagctgagttttcaaatatcatttcacaaacctaagacctagcataaactaatcatgttttaattccattgttcattaaacagcgacggttgtgtccactatccattgtgttcccaaggatagcttcctgccactggtcgtcatggttttctggggtctaccccttctcgcctctcgagaagttgatctaccagtacaaaatcatcatgcaacattccacccaatcagattaagaaattagagtctagccaagtgtaatatatgtcccggtgctcaataaccacgagcacgactattcgaatagatttggtttactcacactacagtggatgtacactttacccgtactccgcgacttgcccaacacatgagcctacgtcccaacgaatgagacttgccacggcaaagcctttcaataaccccactttggcagtacccgctccatgaactttagtcctcatgcactctaggcgtccaaggtttctagcagtgagaggagttctggctctcccgggaagggaagactcacacatgcattaagttatagttaagtttaggtttacacatggcagtcctaccgatggtgacaccactgtaggcactcgcccctcgtggtcctaccaatggctgccccaccataggccttgcctcacacacatcaagaaaaccactatgcagggatactgcctccgctcggctatttactctgctaagtctatacccatacgagaagtacggttgtactggagtcgtttcatgcttagcttcatggctcggtccttaattgaccagggacggcactagcctttaccggacaccacccaaatcctccagccgccctagtcgaaaacatttgtttagtttttaactttctttcacaaatcatctcatcaatgtcatggcaatatggcgctcatgtctccacatgccgtatctcaactacctttcccaaggtagttgcccaagcataaagcatttgataaatatgagaatgcatgaatctaaattagcattactaagcattcgtcataagtgactagggactcatacgtaattatgggtacaagggaataatgagataagcaataatcaaaggcatggcataataacaagtaggatattcatcactgcatgcaattttatttgtaaacaaaacaatttcacaattgggatcaacatgctcaaggaatggggtgatgacttgcctgctcaggatagttcttattcttgatataatcttgatcaatcttcacctcctggaagctgcatacgctgcctcacgactaaccgatatacaaattctataatacgcgagaaaaaccaatattcaaacaacaatcaaatgtgcacaagcaaaatataatgatggtgtcgaacctagggttgctcatactattccggcttgctaatggattctaatcatgctaagggccaagattcttagtcttttatattgtcatgatggctctattggtactaactagcacaatatatgatatacacattttgctaatatgtggtttagtcaagctacaaggttatgggagggttatacgactacgcatacatctataaatggtcttatactaagggttctgttgttggatggatttagggtcaaacaaataattacatcgattaatttatattatcattttttccaatgaggcattattttaattatgatcatattttacttgtcattataaattataaaaggcttaataattatccatgctctatatgttagatctgtgaggttataggtacagattatttgtaattgtggtcccgtaatgatcaattacaggaggtcgaaatttataattagtgtttatctaatatacatatttgtcatatactccccagtttaatgtatggaaaaggtaaatcaatagcatagctataatggaatgtacattatatgtgtgtgcaacaacatatatggttttggtcgcctactgtacatgagccatttagaaaggggtaatttggaaccatgccattataattttgcaaagtttgagatatgccatcggtatctcaatgacatgtaggacccacatgagtcaatgacatgtaggtcaggatggcatatctcaaactttgcaaaattataatggcatggttctaattttcactttagaaggtgtactacccaatgctccaagtgattcctgaatatattatagttaaattatacattagctagtttctatgagtgatattatatatgtgatgggcaagtttaagcactggatttgttgggttactaataagtggtaaccagtttaggtatatacgtgctattctatatggtattgcattgattaaattatttggtgattcctccacatctagctatgttattattctcataaacaagttaaagatttatctatgagtattaatattttagttacaaaatatgaggctaaacttgatttaactaacctataagtcatgggtttaattatatggccatcgaatattaaataagtactagtattttcctatacatccattcatttgagacatcacttatacttagtttatgtggttgctacagtgacaaaacatgttaaatatatttatttgacatctactctactgtacaatatcaattttatttattagcacatttttaagttgaccataatctaatcatttgatattaatatattttattaaatagtgagttatataccattggaaagcttatgaatttagatgaatttaggttcaagtttcactcgaatcggagctaaaatgaataagttatgctagtttaaagattcaaatttgagttaatccgagaaattgtaaaaatgcactgttcataaatgatttatttttaatcggaaacattatccaaaacccactgtggttgacatgtgggaccggccctggttgacttagggtcaaaccttcttgtttaattaccagtgggtcccgcctgtcataggaataaaatatataattgtgttttcttacattttaactatagggaccccacctgccattgagtgggctaatcaccgttagggataggattactgtgcgctaatcacatgtgggtcccacacggtttctctctctcctcatcttcttcttcctctcgcctgttaccgagcgaggcagaggcgcggctcagcgcagccggcgtggccggcccgatccgggacggcggcgggcggctcggagacggccggggtgaggcgcggaggagctccggcgatctcccgccgatggcagccggcgcgcgaggagacgggggcgtgcggcgccatcaggcgacgccatgcccgagctcggctacaaggggcttcgatgctagggacatcctccggccgaattgaagggtgagggagcatctacggggtatggggattcgatttcacgaactatatggagaggggagctcccgggatagcctacccacggagagctcgccggcgacgaaacggcggccggggcggcacggccatgggcgctaatcgccgattttagagccggcgctagcaattagatgtatggaggacgctacgggcgcgagggtgtaccgcgagacggcgagatggcgaaacgcggcgaagtggagctcgacgcggtgcaggacaggggcaaacgacggcgacgtaaggtgcttgacaacgtttcttgatgtccagcggctacccggcttcccccatggcgacggcggcagcacggctcttcctccactccctccaacctccagctccggccggggagcctcacaatggtgatctctagcggtggtgagagggtgatcgcaaggtgttcgatgaaatgcatacgagaagaaggctgagagggatgaggattttgttgagggcttcgcttaggatgcaagcaaactatggggataagatcaccagcacatgcctaggcgagctggagtactaatggtgatcggataagagcaatgaggtggatgacgcggataaggtttgatctcctcctccattaaggttatgtggctccatcatcgtacctaaagcctaaagtctgtgcgttctaactctagctgtggcaggaggctccgttttattcattgggcgcgaatgggggcgacggaacgcgcgcacatgggagctgtggcggagcggcggcttgctggggcggttttcccgtcctaaggtagttggctagggctagggatgacgcggattggcgttctggccgttatccatcggtggcgaggtgatgggtgatggcgatggcgacggcgcgacaagacgcgaggcgccatgtttcctggagggaatccggacgcgctggcggggaggcggctaggtttggcgcggttctggtgcggcacggaggggatggcgcaccggcacggacacgatgcggtgcacgggggcgacacgagatgcggagatggcgcgattgatcacgtgcgcggctcagtagtgaccgggaaggagcggactcgcagcatgtgagcggcttgggcccagatcgaacggttcatgggcgatgaacagtgccgactgaaaaagaaaaggaatgggggaaaaggaaaaagagaaagggggaagggctaatctgcaaaagtgaatgggattggatttgaaatgaaatgaaatctatacattctggttttgagaattcaaatgtttgatttgaatatttatttagttattcattagttcccaaatgagtttgctttccattagattatccaaaaattatccaattcaacttctaggctttgatatttcttaaaaactaattaaatattctattgtgacatttaataatacaatagcacattggtcgaatttatttgtatagcaatatattttacatacataggtttaatttatttaagttttattctatgaaggtattatgagatttggtgcaatattggtcttaaacattgaatcgaatactcccataagctcttttttatatatagaactcaatttatttacatgacaaattattttacatgagtgaatctatcccctgagagacttgatgaacattgtaaatattaatttaattattccagtgcaacactcctttatatatagggtcgtcatagtggcgattatttcatggttacttagatgtcatgacacctgtcacatggttccaatatttaatatttggcctataaattaaattagtaattaaccttctctttgtatggctttgttgtgttgtgcgtaaatatttatagggttcacaataaatatcttatttttataattattaatcagttgtatagctttagcttaattttcagtggtgacaatttatagtttgacaagcaataccaaccataacatccagcatgatgcaaaagttttaaaaagttcaaaattttagtgatttttattgtcggggattttcaggatgttacacgggccaagtgccctagactcatccaacttacttctattataagaaaggaattagagataaggcaatggatcttatctcatgtaaataggaggcatgtaccggattataagagatatcacgcatgtcttagctggctccctgatgactatataagggggtcggctaaccctaattcgggtgatcgctacaagctactctcaacgtcgtattgcgaaattctgcacagatccaatctcatacgactgaactagggtattacctctcttcgagtgcctgaactagcataatcactgtgtcaccatctttcctacgtctagtgcacccgataaatattattgccgatctagaaaatcgacatatctcttgttacatgttgtaatggtcttttaggcttctttggcaaatgggatcgggaaatgatatcccatccatcgaagggtaatatcgtatcctagccatctattcttctcatctatatcttcacatctcatttagtcctagccattcatccatttccctttgacaatcctgaatctcataacacatttgcaacaggttctttgatttaggcttttttctgtgttttatcggtgacataaggcccaatagcccagtgccgcgactgaccgcaatgttgggccatcccacacggcccagcccgcttcctccaacccaaaaccgatcgtaccaccgacccacgcgtcgcaggtacagcgctcagcccgtcgctgtcctttatttatttccctttcacgcactcccacgcggccacgcaccgcgcaacgctccgccccaaaaggccagacaacgcccgttgcgccgcctcccaaactccgcctcctcctcctccgctgcacccccgcaaaaaccctagcgcaccgacttcgcgatctccgcgccgcagccatgaagggcaaggccgacgcctccaagaagggcgagggcaggtaagatcctctctccggccgtctttgctgctgcgtatgggcggtggaggagggttttctggcggtggctgttgttggttcacatctgagcggttttgtgtttggtgttgttgttgttgttgttgttaggctcaaggccgccggcggcgccgggaagcggaagaaggccgccgctagcggcaagccgaagcgcccgccgtctgctttcttcgtcttcatgtgagtttctcgctccctcgcccacgttttgctctgttcagatctagtacagatctgtcttgagtttttgtttaatttttgttgattttcttgaattttaatattttttgtggtttttattttttacttttgcaggtctgagttcaggcaggagtaccaggcagcgcatcctgacaacaagagtgtcgccgccgtgagcttcctgacaccatcatctttttcgccactttttggctgatgtactttagatgtccaatttttttctcctctgttggttcattaggtgagcaaggctgcaggggagaagtggcgagctatgtctgagcaagtgagtttttctctgcagtgttcaaaaattagtacatgttcctattaagtgtgtgcatctgttatttagcatacatcatccatgagtatcactagaggactgtttaataattgttctggcctgtttgttaggaaaaagattgaattgctcctaaagtactagttgaatgaaaattgcaatttgtttttgaattctactcagtgaagcgcttaagtacacataagtaccatgggtggctattgatgtgacaatgtgccatatgtttttggcccttcgtgttaaattttattaggagaaggcaccttatgtggacaaggctggccaaaagaagcaggactacgagaagaccaaggccaacttcgataagaaggtgatgatagaataattgtgcatcctaattatagagcccttcaagcgttaggcactaattggacttcttgaattacttcttcaggagagcacaagctcaaagaaagctaagacccatgatgatggagaaggctctgacaagtccaagtctgaggtcgacgatgaccaggatggtggtagcgatgaggtaatcattaaaggaacacccggtgccctattttagcttgaatgcccaatgaatttttactactgctagttgtgttgctaatgaacatttttaatttgctctttgcaggaaaatgaggacgatgaagagtaaatagtgtatccgggggcatgaggtagcaaactgtgtcttaggtcccctattagctttactagtttgctatcttcgaccctaagatgttgggaataggcgtgcgtgggtgtgaagggggaccgtttagaattatggtactcagaatgttttcctacagtggattagcaaagaaaaagcctgaatgccgcctgctgttctgttgcttttcttttgctaaccacttgtcacagaactttgtttcatttgctaatctagtagcaattcagttagctttcttttcgttaatttcgttaattgcatattacatttggtgttatacacttgtttcgatgcatttggtttacctagcttaacacacatggtgaatccctcccattgctttctgctttcgttagatgcctgctgaagctacttcatagtggatggaattatattgttcgttgagtcggtaggcttctgtgatggtactcaattgtcattgcccgctcttatgctgttccatctaattgtgatctaagatttcgtatcaaattaagtaagttcagaccgaagatatgtaagtactgaactcgttttggatattgatgatttagttttctataaacaaggcattgtaggcttgttgtagctttatacggttccctttgctttgacttttcaacttcgaggattccagcaaatgctgttaatagtagcataaaccgtgtcgaccatctgctggtgctccccgattctgacagaatattttcccctttctaacaagtaaaaacaaaagaactgaacctttataccattcgtaccatgagagaacatggatgcctataattttttttacatttttttttaaaaaatcaacttgtacaaataattccgtataaacacttatctagatttattctgattttttttatggacggaggattacctcccatcactccccatctccaacagcacacatgccaaactatccctctcgttggcaacattgtcttcccgcattcatccaccactgcggtactccctctatcaacattgtcttcccgcctttatccaccactattaacattgtcttcccgcctttatgcaccactgcggtactccctctgtctcataacatagcaatctaggactgtatttgatatttcatagtacaacaaatctggacacacccctactcagattcgttgcactataaaatatcccatccaatcatagatcacacccctactcagattcgttgcactataaaatatcccatccaatcatagattactatattataggacagagggaggacctcttacctccgcgttgttgtgcggcaacaatccccacaacgatgaactgctacttcggttagtgcgacggcaccacaccggacaccaccacaacgacggcaccacctcgtccttgccatgcattggcatgagctcggcagtggcgacgaaggatgcacaccagtaaccatcctcatcatcgttgatggaggcgagggtgtcagggtgagcgaacaggctgagaagctagacgacggaggcaactacagctagcacaccatagtgacggactcacaattgccgagtcggaacttgatagtgcactccctgtcactacaaacacggagcatgtcgaaggaggagaggacgagcgagatcaacatcaagtcgttggtgattcacattgggagggaaaacgtccctacggttaatacgcctacccggtggccggtacacgcccatctgcttcctgttcacacgatcattggaggcaaggcaagacgattacgagtgacgtggagctgtgactactacagcaaatacccaataaaggcagcgagcttggattaattgaatagcacggaacgaaagaattcacatctccggtggctaatttaaaaaaacacacggattgaatggtaaatttttgaaggtccagcgtattaggtgagtgagtgaaatttctcgctgccggatactcaggtactcaggtcagccacccagccaggtattcaggtccaacctgcttccgtgacacaagtcgaaacctaacgcgacgcacggttcgccccgcgccgcagcgctgctcacgcgcatacgcattccccctctcctctcctttataaatcccccgcgcgccggcggccggccggtgaccaccaaccactctaccacaaccattacgctatccgccacgagcaagcgagcgagagcgaggcaaagcaagaaggcgacctcaccaaataatcccccaccaccacaagaagcaggggcgcgccatggcgagagccgctaccgtggcggcggcgtcgtccgcgctgctgctggcgctgctcctggcgctggcgtggggagccgcggcgggggcgggggaggtgccgctcggctgggagctcggggtcggcgtcggcggcggcagcggcgacgacgacggcttcgggttctccggggcggcggctgacggcgccgcggtggtgaggcgggtcctgcaggggcggggctacatcagctacggcgcgctgcggcgcgacacgacgccctgctccgtccgcggcgcctcctactacaactgccgccccggcggccaggccaacccctactcccgcggctgctccgccatcacccgctgccgcggctgaccggcctccaccaccaccaacccgctgttcgaactggattcaaagttcgttcgttgctcctctccgtctactcgctagttcgtcttcttcatttttttctccccttccttactctttttttttctccgccctgttttaaccgtgaaagaagaagcacaattggtctggatcggtgcccaggaatcgaatcgagtgaataagatttgtgtcactccagtcctgtatgtggattctaataatattaataatcaagttgtgtataaactggtggatagatttatcgttcaaggatgagtgctgctactgatgacaacccggtgagcaaattcgctcaattgcagcaatcgcccttctccaaacacgggtttccttaacattaaaatgttatcaaatggaatggattaagagaagcagaggttggctaagccaaccaaattgtttactaaatccacaccagctggcctgattagtcggaatggtcagcagctgatggcgccgttgggacttcaggaatcagaacctgcttttctgcatacccaacccacaaaacggttagccaccgacactgcgctccacctcatgttcactggtctgtgcttaatgatgattagcaccagaactgctgctactattcgaactttcgaaagagggaaagcgaaagtagcgtacacacgtttatgactccattgaaacaaagggttcttggaggaatataatcctatgaattcttttattgctccaaatacagagatttaagagtaattttaacataaggtccaacctattggaaacattctgtgtgtctatctttcttctgtttcgtgtggtttcttgcgtttcatccaaacgattatttctatagattacctatgtttctcgatcaatatgatttgagatgctgagatgtttggttgatgaccaatttttatatgtgttttgaatcttactccctttatcccaaaatataacaacttttaacttttaaaatttattttaaaatgtaacaacttcttcatctacattctcttcttaacaaaatataacattccaccatttaaatttaaattcctacttgactaggaaaagtacctgtcacacaacaatgttgtcagcaaattagcaagccagcactcagttcggttcgttattattactacaacgacacttaggatatctgcatatacatatagtgcgtactttagatcgtcatgatggtgcatgaaaccattttcgttaggttagagcgggtagcacagtggcgtaggttttgatgcatgagaaattgagatttgaggaacctctctcgttgagtcattttctgccttggcagcgaacggggttcggtttgctgtgttgggtgcgacgtcgctttcatagctcgcatatgcaagatcctttgtcttgctcgccttggaacatggggcttttttcttcccgtggttgggtgttgaggacttcttcgtccgtggctgtccgtctcttcctcctaacgatcgatcaatcgccttctccaccagccacgcaaattcagttcaaattcttatcctggaatgatattgccaagtagcgaactgtgagcatcatcttggtgatggagacggttcgaagaatgtatgagaggcttttaacaactatagggtgaagcagtcaccctgctacgcatttagaattgaagggttttttttggttgtgtgtgtggtgttaaatggatctccctggtgaagcagtcaccctgctacgcatttagaattgaagggtttttttggttgtgtgtgtggtgttaaatggatctccctccccttgagccattgggctcaagggggccttgacccgcgctctgattgggggcgcccagcccaatagctggtgggcccccgtcaccctgtgccatataaagaggggtggaggacgggacggcacaagacacaaggttcgtcgccgccgccactccaccccacaaaccctaaccgatcgagggggcgcagccagtgacgggaagtccaccgccacgccacgcctcgtcgtcgacaccgccgctgcatcaccgccatcggcaccgagttcaccgtcaccgccgtccacatcaagcgcgcaacgacgacgacgatggccggccgcacttcctcctcctcaacaacgactggtcacatccctaaaccctctcactccctctttgttaattcatctattgctgttcatccatccaaagtgttctacctgactagatctaaacctaggtgatccaacagagaacactaacatgtggagctaccaatgtttaggatatcggattggctggatagaatcaacaggtaccacatacagtacatctgtatgctcatagagttgatattttttttttcaacataaattaagctttaattgatcttctctgttctagaatatagctatttagctgcctacttagataattatatcacgataattcaattactctaaaaccactcacattcttcacatagttattctatagcctataattatttttaaaaactaaaaaaatgatataacaacaagccgtggcaaactacaggcacaagtgttcttcatccttaatctcgaccaaagcaacacttagactataatgaaggctttccgtaagcaatatgtagcgcccgttccgtcgtggcgcctagcgggaaaattatctcttaaaaaccctaattgcgaaatttgtttctttgcttgttgtctagtgtccgtgccatctcaagatctcaatccccgatctatcgtcgagttcaaatccgaatccaaatccttccaaatcaaattcctccgcaaaagtctattttgcctcccccgggtcgaagggccgaatctcgctcggcccatctccctctctccctctcccgggcgctccctctctctctctctcgccctctcccctccccagcgcgctccgctttcccccacgctcagctccgctccgcctcgcccgcgcgccgcgcgcgcgtgcgcgagagccgcgccgagtgctcctcctcctccgctccgcccgcgcgcgtgcgcgtgagccgccgcgccgagcgcccccttcccttctcctcgctctgccgcgcctgcgtaagccgcccgcgccgagccaagtcctccctctccgctccctcgctgccgcttcccgcacgccgtgttcgcgtgcgcgcgcccgcgcggacgccgcccgttgcaagccacgcgcgcgtgctgagtggccgaccgcccggtcgccgccgccgtcagcctctgcacgcgtctgtcgcccgtgtcgtcgcgccgctccaaatcgcccgccgtcatcgccgtcgtcaccgcccggcccccgccactccgcgcgcaagccgccaagggacggaggcagcgcccctcctccctctgccgcgtcgcccccgctcccctcctcctttttcccgaatcggcaaaagggcaagcccctttctccccctcctttttcccctttttcccccgccggcgtcatcctccctgtcgccgctttggccgcgaccgccgagcgccagctcgcgccttgaccgccctaagtcggttcccaaaccgacattgccgccccctttaaaccccagttccttcccctccaatctccctcgttttcgcctcctcgccatagctgccgtccccgtgctctgttcgccgtcgccgttcgttgttgcgcgtgtcgaaggagtcggcacgagcaaggacgcggaaggggacttcggccgcgccctctccttcctcttccccggcccgaggccggagagattactcccgcgccgtcggcctctcgtcacagcgcccctcctcatctcgatgatgcctccctccgttcttcctcctcgccccatctcctccccctagcttttggtagtagctcgagtagactccccgtagctagccggcgccgccccgaccgttgccgtcgctcgccgcgtgctcgccgccgtcgccgctcgagctccgtagcacccgcacgtcgccagcctcgctcggcgtagctccgtccaatccgacgctagcatcagattcccgtggtcgcgtggatgctctcaccgccgggaatcggtccctcgtgacctcgtcggcgtttccctcttccctccctgccggttgtcgccgccgcgattcgccgctgtcgaactccctctggcgaatccgagccgttggctcgtctcccctcatcacgaacaatcgcccggtgtgctagcttttgcccgtatcgccgtggttcgctccgccgctcgccgccgccgcccgccgtccattcgcggccgggtcgtcgtctacctcccaccggcccgcgtggcagccacgtaggcgccacgtcggcgccagctcagcctagaccgggtcgagccgaccccggtcagtccctccccgtgcgcgcattccaccgcgagccgtaaggctgcgcgtgggcccgccgcatccgcgtccaccgtgaaccgcgcgcgtgcaccgcgtccctcccccgcccgcgcgcatgagccgcatactccctccgcacggtgagccgagccgctgacaagcgggtcccacccgggaccacgcatggtgagcccggtccaccggctctctctctcctccctcccgcgcgcgcgcgtcttgggccgccttgggccaccttcttgggccggccggcccgttaagctcggccgagccgccctttctctcgggccgcgccctagccgcccgagggaagtctatattccctccctctccctttttcttttcttttcttttccaaaaaggatttaattaaatcctttttctttagaccaaaaatccaataatcttagaaattcaatatcttcccaaccgtaaatccgtttgactccgttcaaattccaaaatttctcaaatctcgagatctatctaatggcacgcttagaggtcattaatagagctttattttcgccgtttgttgagttgtcccgttttgcgtatagtttcggagcccgaagacccgcagtgcgaggatttcgaggatcaagctccagatctcgagcaaggcaagccacctttgaacatcttgagcctatatttgaaatctaattatattgcttgcaaaatattatgcattgataggattgcacttaatctgttgttctgtctgcaaggcagattggcagacctacctaacttgttgcatttgatccttccattgttaattgctatacaatgtccccttgtaaccatccagttgcgcctcgatattcgtgcaccctgtgccagtatcgacggtcgccttcaaacttaaaatctgagtaacaacttgggtaaaactggagttttacaaaagacttggaaaacccgacacctgggtcggtgcttgcgaactaaatgaatttccaaaaccgcggaccgggaaacgtaccgggtgtacggtttcccgctctcgcacttaaggaccgattccttggaatttcatccaaacataagtcaagtacgaccacatgggtggaatgggacacccctggctgagtaactagcttatcaggggagccttgatgccgagagacatgtggattcgccggggtagtgtcggggaggacccctgggcttcctggcgcagtatggtctgggacctaacctgttgttggtctgggacccctctcgtcggcatatggtaaacctgtgtcggctttggaaatgccttgtcatgaaagcttggaggtctcccgacgtggctgatccccacgggctgggtgatccgagttagtaatgtcgtgtgggtaaagtgtaccccctctgcagaggttaacaaactgttcgaacagccgtgcccacggtcatgggcggatgtgaggtgattcctagcgtagtttggtttgactactgcttgtgaaattgctgtgtgaaaaggggggttcggtgtttgaaaaatctgcagctgatgagatcagctaggcccggatggccgtttgaaaagttgttggcccgggtggccgtttgaaaagttgttggcccgggtggccgtagaaaaagctgttggccgggtgccaaccttgtttaaattctaaagactgatacattgcacatactccgaccggacgagacgcactgtctcatccgtgtcgtttgagaagcactcacttagttgtttcagaaaagagttcaaataaaattaattgcaaaaacaccagcctttccttgaagcctgcattaaacacttacttcccatggcttgctgagtactcccgtactcacccttgctctatataaataatccccccccagttgctgaagaagatgaagcggatcctgctgatgaggagttcttccaggagcaagccggctacgatgagttttagggtttcggcctagttcccaagtcgcgcctgtgttgattggtccaagtcctggcttccgctttccttttgtaatgcagttgtgagctcgggatctgtctgcagcccaacatgactgtacatctactctataataaagagacatctgttgctgtgatattctgtctccctgtgataccagcactgtttcctgggactgatatcgattaacaggttaatttggagcgtcacgggctagtttcggtcgggactagttcggggcgtgacacaataccttaaaaaagtaacaaagtgtacatgcgccgtcattgccatgacactatcagttaagaccaaactacaagttttcaccgtgaggagtaattccagacaattccttcaataaaaaagcgaaagatgctatcgttggatacaaccagctaaaggctagatctaggaatcggtactcgataggtaccgcctaattaagtcacttaggaccggtgctccctcattttaccatggggagtaaagccgatatactttttttaagtcacttaggaccggtgctccctcattttaccatggggagtaaagccgatatacttttttcgggttgataatacttagtcttatacaagtgcacggtcttaaaaaaataagtttgaccattgtttttttattataatatgtataaaaatattaacaaatatatgattttattaaagtactttttaagactaatctatacatgtagtcaccatatttgaaagacaaatattttagaaatgattcataattaaatattctaaagtttgactttacctttttataaaatgacaagtattatcagtccggagggagtatactactgttaagtctgaattttgaatcccgatgagccaaatacatgatcacacaacgcttagttatctcgtagtgttacataccggcataatgtttctccaaggatatgatttacttcggttacatcttgtaggtaggtttgcctccactagaaaaacgtgcagtggggctgccatctccctgatttatcgcttcacgccttcacgtgctattttgctttgtcattttcctcaacaacatttcaaccctgttcgaccctggaatgcacattacatcattttatttgtaagatgaaaaaaaaatcgagctatcataaagagagtactgttcgaccctggaatgcacattacatcattttatttgtaagatgaaaaaaaaatcgagctatcataaagagagtaaaatgcgcagggagaaatagcttctgtgaaaggcagaaaaagcttatactttcccagcagatctcaggaaaggaccattggtcaaaaataaagattgggttcaagacaaacgatttcatggtttgccagatgatcaagagaaaagataattggtttgtcacaaaacaaaagccatcatatcacaaaaagtaaattcctcactaaatgcatataaccaacctaaactaatcaaaagtatccatacataccttttaagatagtagagtaaaaaattctccagcatatgcatcaagcaatgcatacggccctaataactagatatattcttttagataatattgtaagtacattatttagagcaatccttctccttggatcttaagttgggcgatgagaatatagcagatgacactcgaggttgctgactacgtcactgcgatcaagctcctcaagatcaaacatgttcttctctgtccagtcccaagaatcccagtccccaacttgaagagttgtttatctccaatgtggcagcattagtacctccaatctcctcaatattatctttaagattgaaggaaatgtttttaagggcataacaaaaccagaatggactaactttatggtgaacggtaataaataagtgatacatacggcaaatgtattcctggctgctgttctttttaaagttatacttgctgcacgtggagaactggccatagcgaaggaaccattgtggtgtcttctctcccatttcttgaaccattgcccaattgctctcggctaagtaacctgatagcaaagtgatggcctgaatggttgaatattggtgaggaagaaacaccaaacgattagctgtcagttcaagaaatcaattgtgaaaaaacaaatgagagcttgaataaattgttaatgtaaataccgattcagctaaaaactacgaccatgcacccactacctgaacaatcttcaatgattttgctgcttgcatgcaagcatcagttctcgattccagtcaggcatctgtaagttgaaactttaatgtttcaagtgtgcgtccagggagagaaaatacaatactccctccgtctccaatataagggattttgaccagatgtgacacatcctagtactacgaatctagatagggtaggatgtgtcatatctagctaaaatcccttatattttgggatgagggagtagaagggaatgggcaccttatataggatgaagcatgttggattacttgttcttttccctccaatgcaaggattctgaaatttatgatgcaattccttaattttgcagctgagtgaaccggtttttgtgcccagtcattgcatgaaattcaactaaaccaaaagttcatacaaactgatctacctgaatcctgctacactcaatcacaaattgactgtgcgtttaatcaatccgataaaattaatccaatgaatgaatctaaatcaatgctagggtttcaccccaatgctcgagtcaactacggaaatatcaaaatgaggacaatcaagggagagtaccttcctagacgatgtccacacgtcccacggaaaaacctttgatttcaggccaatttgagaaggatttgagaggagagagatgcgagatgggcagttgtgcgcttctgttcttcatgcaaagggaggagtccattcctgcaattagtttgctattagttatctcatgggcccatttgtaaagtaagaagttaaaaagggtcataatgtatagtttacacactataaagagtagcatgccgtccgcaggctcttcgctaacacatgccttgctccattaattcaatgaaactagaaccaggatgtttctttaacccacttaaattagctctggcccttgtattggtaaattcattccactgcccttcctgagcatacacttctgaaatcagagcataaatacctggtttctgtggtccatgctcaaggagctctttgctaatagcaagtgccagttgtgtatttctatgcgttctgcaagcagagatcaaaacacaaaatatagtggatttatccttcaaggtagatagctttataaatttgtatccatcttccagatgcccagcacgacccaataaatcaaccatgcaaccataatgctcttcctgtggaagaactgaatatactgaggtcatggaattgaacatacgccaaccatccttgacaagaccagcatggctgcaagcagtaagcacagtagagaatgttaactcatcaggctgaatgttttcttcttccatttgcttaaacatttcaagcatattaatatagaatccatgcatcgcataagcactgataattgcattccaagtatccaagtttctgtattccaaactaaagaacaaacctactgacaaatccagtcttccacatttggcatatgcacttatcaatgaatttgcagtaatcttatctttctctaacagggaacggtaaacaaaacaatggatttgttttagaccatttagatggccaagctcagagacagcttgaacagcagttacaagagacatggaatcaggtttctccccatgtttctgcatcaagtgaaataattgaaccacctcatctccatgtccatagggtaagcaacccttcatcatggctgtccatgaaaccaagcttttctgttccagtaaatcaaatataacccttgctgctgcaggttttccgcaaactgagtacatataaagaatatgattttcaacgtcaccatccgaacaaaacccatgcctaatcccaaatccatggatccacctccctctcactaaatctctttgatcagcaaaagcagcaagcagactaagaacagttgcaaaatctggaacaataccttctgccatcatgtaattgagtaaggaggtggcctcattggccatgccgttatgtaggtaaccgtacatcattgcattataggagactgcatctttaacaatcagttgattaaagagatgtcttgatatcgtgatttttttgcatttggagtacaccttaacaagagcagtcgccaaaacaacatccagaggtatatatcttcttattaagtaggtatgaatactagcagcatagccgaaatagcatacctcaacacaagcagaaatcacgtttgcgaaggtgacagaatctggagttattttatgctcatgcagcatcacagacaaatagtggattgcatcaaaactctgtccagctctagtaagaccagaaagcatagcattccatgaagctgcagttccctttgaattctgtaaagtagcaactgctgattgataagctccacatcgagtatacaagttcacaatgcaggtctctagaatataatctgagacaacaagtgctctccttatggaatagcaatggagtgatttgccctctttaagtgctcccaaattcccagctatttgcagtaagcttatcatagtcacacggtttacttccaagttgccctgcagcatatcaatggcaatatcaaatgcattccatgcaactgaatccacaatttctgaataaccagtgatcatcgaagtgtaagcaacaacgtccttgtcaatgatctctttaaacactccctgtgaatcgtccatcctatgaagcttggagtacaacacaatgagggaggaaccgatgaatttatccccagacagaccaaatttaagtgaatccacatgcattcctttacccaagtacagattctcaagctcagtgcagcttttcaaaacaaaagtaatagttttcccatccaaaccaatctggtgtaatttcaaccttttgtacaagataataacttcctctggataaccagctctaaaataatcaaccatggttgaattccacagggaaagctcatcatttacaattttctggaaaacaagtcttgactcagacagggcccctaaattagcataacaactcacaatcttagagccaagaatcacatcccagcacaatccatgtgtgaaaacatgacaatggatcttctttagagacctaatatctgcacagccttggaacaatggagcaaacttgtcaaaattaagtatcttattagagcatgaatttgcatcggcagtggatgctgatagtctccaacgcagcttcagcactgcaattttatcaaactttgaactagtgtttccagctaaattcccctcaaaagaattggtagcatcatcatggttgttgacgcaagaaaaacaaaaataggtaactaattgactccgaattcatagacatacgatgacagttcagttaaatgagcctacaatataatagtcccaagcacacatgtgtgagtcatgtgcaatgattacatcatgtgtgcttgggactattatattgtagactcatttaactgaactgtccaattgtggttggtgacatggttcaggagtctaacggtgtaccggaaacagatatagtgtatatctggaagtggagtctataaataggtccctaccctccagcctcataatgcattgtgagcggaacaacggaaaaggaatagagggtaggccggatagacccacgtaaacctaacaatatttgcttttcttgcacctccaaggatagactattcaactaaacctgatcaacagcggaacacatacaatcagtgtactttagtacaacagcactaaacttgatagcagatcacattaaattaagcgataatcccagttatggcatacacagcagaggagtgaagccacaatctctccaggacattgccacaggtaatgaatatgaaatactaccgcaatctcgccggtgctaccaaataaaccaccacctaatcagaacaaatagccacatcatcaagcagtcatcatgtaaaaacgagaaaatgggaaaactgaccaccagccgaaatctttttcagaggttcattccgtgaaagaaccggagtaggaggaggaggcctcggggtggccgccggcaagccgacctccggagggacggcgccaggaacagtggaggaggggcgcgcgcgtgggggaggcgcgggtggtgcggccgtgcgagggggcggcgctgccgctggctagtggagacatcggagttcggagcgaggagaggtggcgtggcgagacggtggggaatcgcgtgggcctttgcgcgtcccggagaaacggccgggtcgaaagcccacactaccattcggcttgggactagctatccatcacgcgacagatttttttttttccgaatcacacagattttatttttttttcaaatcacacagattttagattaattgaattaagctcatttgatcacttgattagaagagttatcaacatatattgcatatattttatttattagatctttatattgtaagaaaaaaatatcaccaacccatctactaaaagttacactgtgaagtgtaactatagtgtaattacagtgtaactatagtgtaattacggtacacttatatgccataccaaataaacttacaaatgtaattttagttatataggattgtaattttatattttaaaggaaataaaaaatacatatttacttacgtaatatttttaccaaacctacagtgcacttacatatcgtatcaactgaatttacgaatataattttagttatataggaatgtaattttctttaatctctttgcctagccgcatcgacgtgcgatgcgtgtactcatcaattatgtgccaaagctagatgttgctggcctcatgcgtgcgtgggaaggaaaggcatcacagccgctaattaaatcatacagagaataatccaagggaagcaaatccgagtgattttggggccgccagatgtttagcaaaatcgttcggctttgttggttgccttggttttctgactttctcatcgacacgatgtgattcacgttcaagggtagcatgtacaactacaagcaaatgagttctgtgctaagagagctaatatgaacaattagttcatcccagcttccgtagcatagtggtagtgcgttcgcttcgtaagcgaaaggtcgcgagttcgatcctcgccgggagctttattcatatgcatgttttccttttgccgatccatcatcaccgatccatcggcagcaatggctatgatatgcatgtatgcttttgccgatccatcactccgtccatcggcaatggctaatggtgccgatccatcactccgtccatcgggaaatggctatggtatgcaggtatgcaacgagctagccgacatgcatgttttctatttgccgatccatcactccatccgttcatcggcaatggctagctatgatatgcaagtatgcaacgagctagccgacatgcgagccaacgagcacaagtcgactacctctacctctagaaacgccattttgcaggaggatagctactggccaacgaacgcatggaccacctgctgtatgacagtatgatactatccccgtcgctctccggcaaactattttcctcggcagacaggataggtgcctcccaaatgctagcttaactaaattttgcgcatccttggtgcctgcttgctggtcctgcaccgtcgacccccccgtggccctcaaattcgtcctctgagctcgtcttgtaaagcatcagcgcggagaacgtatggtcatgaatgaaccgacatgaccagcaaatgggatcgggcaaaacgatacggccgtgtcccatacttgatgtgcagatatttttgtgacgtaactgctctcggagagcaggctgatcgagtgctaacgtgtaccgataagataggtgctggactaggaacaagattggattggagagcattggagtagaaactcccgtgcatcggccctacgtacttttgtgtcaaatttacggtgtcgtaattcaacttttctcttccttctctcatttttctccgtggatgcgtcattcgtgaaatgcttattggcaatcggttgctttttttcttttttcgttttcgcctccatgagactctgactgcaggaacgccggatgcatgcacacttcctagatatcagctggttataatttagaaattctatgaattggagacgaatcaatactagcgctttgaataactgttcatttttttcccaaactacacgtgaaaaatcttagccatctcggaaaggaaatacacaaacacgagcaggctcccatcggatgctctaattagtcgaagaaaaaaaaaggcaaaatttgagttttgaaacttaatttgagattgattttaagatatttttaacgtagttccttttaagcattggtttttaagtcacaacgaacacatatataaaagttttacatataaatttatttttattccctaataaaccgttttgcttactaggtaatactctctcctttccaaattaatcatcatataatataatttaaaatttctcaaattgatcattatataaccgcatgtacacggatttcatcataatataattaatgtagcaagagaaaatgtatgcatgctaaggtgtaattggcatgatgtttttattgatgcatgcattgtgagagaatatgagtatggtcttttaattgatgtaatttaaattattcttggtcttagtgtataaacatatcaatttcagaacagggagtattagcaaacgatggcactctactatttacgaggaacacagaagatgcatttttcgcttaaaagaagcacatgcgaaaaaatctcatatttccggaaatacgggggaaacactaataaaacgacagaaattgccagccgtgcatagccgccctgtaccgtttcactctagtactcgtggcaattgctactaccgcaggcacagctcatacgccggacacgcttccatgtgggcccatgaggcgcacagactccaacgtgcccatggaccaggtccaggatattttcggcggaatggctcgcttccctctcttctacaaaaagggcctcctagcaactgcagcaataatcagatcctccatcccgcggcggccgtgagcaccaacactcacgcattccttcctactccgcgagatctccggattcgtttcggtgttttgcgagtcgcgcccggagaagaggagaggaaatccggtcaatcgcggcgtcggcgtgccgtcgcttggggtggtgttggtggttctgaattttgattgcttcgtgcttttcgtttgggggagggcagtggtcgccatgggattggggaacgaggcgagctcgtcgtcgtcgcggctgctggatccggcgcctctgctgccgcaccacggtggagatggcgccgggaagctgtcgtcgcagcccaagaccttcgcgaacgtcttcatcgcggtggtcggcgccggcgtgctggggctgccgtacacgttctcgcggaccgggtgggcggcggggtccatcctcctgctctccgtcgcggcgctcaccttctactgcatgatgctgctcgtcgcctgccgccgccgcctcgccgacgagcacccgaagatcgcctcctttggggacttgggggacgccgtgttccgcggtccggggcgcctcgccgtggacaccatgctggtgctcagccaggccagcttctgcgtcgggtacctcatcttcatctcgaacaccatggcgcacctttaccccgtcttcgcgccctcctccaacgcgctcctctccccaaaggcgctcttcatctgggccatgctgccgttccagctcgggctcaactccatcaagacgctgacgctcctcgcgccgctcagcatcttcgccgatgtggttgacctcggcgccatgggcgtcgttctcggggaggacgtgtccgtctggctcgccaaaccaccacccgtcttcgccttcggcggcctgagcgcgatcctgtacggcatcggcgtgtccgtgtacgccttcgagggaatcggcatggtccttccgcttgaggcggaggccgccaacaagaagaagttcgggaccacgctcgggctatccatggggttcatcgccgtcatgtacggcctgttcggcgccatggggtacatcgctttcggcgacgccacgcgcgacatcatcaccaccaacctcgggaccgggtggctctcggccgccgtgcagctcgggctgtgcatcaacctcttcttcaccatgccggtgatgatgcaccccgtgtacgaggtcgccgagcggctgctccacggcaaacgctactgctggtggctgcggtggctgctcgtcctggccgtcggcctctcggccatgtacgtgcccaacttcaccgacttcctggcgctcgtcgggagcagcgtctgcgtcctgctcggcttcgtgctgccggcctcgttccacctcaaggtgttcggcgccgagatgtcctggtccggggtgctcagcgacgtcctgctcgtcctgctcggcctctcgctcgccgtcttcggcacctacacgtccctgctgcagatcttccattcctccagcgcttaatctctggagaatctttacggatagctgcgccgatgattgatttgctcatttgcttcgcgcgcgggtgtcagcctgtcaggtacgctggttgcattcttcgtgtacagagaaggtgatcggtcgatcagaggggcaatgcccaattcagcttgctgttgatttgggcatggacagcgtgcatcggccgcattctttcgattacaagtcagatggtttgtacaagttagcgtggatggcatggagaaatctgtatggttttgcaacgacagattcccatagctactcgtgtcagttaatatttatgtgtatgtcttggatgtttcagctgctgcattgcacggtggaatcgatgaaaggacatagtaagtttcagtctaagtttaagcctatttagttgataaataaagtgtctagttgaggttgcagcttgtgtgcggtactgcgggttgtgtcaattaggaaggcaagcaatcgggacgacttggcaaagtatacattctattctgttcattctgttttgtcccaagcaagtaaacttgtaatgccccaactaccaatcgaaatatcgaatcttctttcagcttgcctgttattaccaatgttgcacatataattctatcacgaaagaactcaaattagattcagacaagagcaaatcgcgtcctccatgtcgaaatatctgacgtcgtggaacatttcagagttacaattctcatctggcgttctgacgcaagaaaaagaaaaacgtaagcggactctcctcttttgctctgggcatctctacatttcctgatcaatcgttctccctaatcaggtgaagaatcctttattatcttttcccgtgtgcctttcccgttgtttttttctcgtctctcttcttatcctccagtgaccgtatatataagtactgagtaatgataagccaatgcgaccgtgccaagatgttactgtcatcggataaggtctagacgacgagccaattgatctgcatccgtgaacttgaggcggtgctctcacccaacatttccgtcgtttgttcggctgaggatgctccgcggctcacaagttgctcttttcttgggttcgtttcgttttcagggtggggtttcctggggccctttttttcatgatgatgtattgcaatttgcttctcttcctgacagcgacggcggtctgacgttaacgacatgttaattgtaggtatagctgtctccgatcgactcttcttttttctaagatgactgtgttccggtgactatcgcttccctggccgggtcgtgtggttcgattggcaggataaccgatacacacggctgttttttcatggcttatgttttcagagagggcgaagcacacggacacggcaaacctgcttcttagggattgtgatgctttaggttgcactgctaccgggctactgtccgtgtccggcccatctcttgcaggacaagcggttcgcttcgctctgattgtacgaggagaatatgggccgttgcttgacgctagatgggctgtcaacctggacttctcacgttaccagagttgggccaaattgtttggcgctgatgcgctacgtttgttaactgttgtccgatccgacccaatcctatcagtcgcagaaaaggaatgttcttatgttcaggcaatctctgagtctcgtcaacctaattaaccgcgtggttagcaggttaggtatcagtctgacccgcccgattactattttcttccctgtgttcttttcaggaatgttcctgagcaagagggtgacgaaaacacgaccatccatccagttggtttcacacttttcactggagcaccagctagacgcggagtccgcgtgtcgagcagacgagagattttgcacagttttatgctccaacacggcaagtttccggaatacagtggtgtactagtgctgtacaggtcttttcagcccaccactttgcttgcctccatttaagaaaggggcaagcgttccacgaattcgctgtaaaagcggacaaatcccacccgtggagagtaggacaaaagggcagaatcaccgtgccgagccaagtgcagacacgacacagcgtgacgccgcgggacgtctccgtttcctcacctagcacatggtgtcacctagtagtacgtgaggctagcgcccgctgtacctgtacgcgaccccgcgtgacggcgtgtggggtgggcacgaggaaacacctgccagtttcgggggtcgcggctcgtacgagccgcggcggcgggacggaggagataagcattggagcgtgatgatgtggtggaccatcaagcggcgccggcgaggcgagcgtgggaggggacgtgggtgggcaaagtccacaagaaagatacgacacgagacggggcgacgcggacgcaatcgctgggagccggtagccggcgaggcggtccggggtgcgtgtgtatcgtcgatccttatcctatcaccagccgcccacctataaatggcgtattaatttggccaccataaacccggcgttgagagcgacaactaaaacctcgtggaatgggggagccgccggggaagaccgggcgacgtgacgcgggcgggacggcgccggcggtggaagaccggtggacgcagctcccgccggagctcctcccgctcatctgcaagaagctgccggactcggccgacttcgtgcgcttccggacggtatgcagcgcgtggcgcgacgccgccccgttgtccgacgtcccgccgcagctgccgtgggtcgtcgagcgccgcgggtccgcgttccaggcgagggcccatttccgcttctactcgcctagctccgggaggacgtacggcgtccgtggctacggcggccgctcctggctcgtcatgggcggcgcgtgccaggagcacctcgtcaccaccgtggacctctccacgacggcgctgtacaacccgctcaccggggagcgcctcgcgctgccccccgcgccgtacccgcagtggcgccacggcgtcgtccacgtcgtggccgccggccgccgccgcggcggcgctcccctggtggtgaacgcatccacgaggacggggcacttcgggtactgccgccagggggataccaagtggaccctggtcgacgggcgccaggacatgggccaccgcgcgtaccacggcgggcggttctacgtcaacacaaacgcgcaggagacgctggtgatcgacgcctccaccggcgccgtcgagtccgtcctgccgccgccgccacgctcggccgacgccggtgccggcgtctcctgcggggactacctggtggagtcgcgcgggaagctgatcagggccgtgctgttcccgcgcgacggcgtggtgaccacgtcggccgaggactactacctcaacgtgtatcagctgcaggaggacgggaaggccgccgccgcgtgggccaaggtggagagcgtcggggatagcgtgctctttttcgacaagcacgggcacgggttctcgctggagcccaacggcgccgcggagctgaagcgggattgcgtctacttcatgcacgagaagcggacatggctggacgccggggagtacaggttcctttgtcggtataacatggagaccggagaggtcgatagagttgtgtcgctgcccgacacgttcggggacacctgggttgtccccggattgtgcccctctgaataagatgtgtcccggcgatgttgttggtttttcggtgtttcttgtagttttttctccttgaattttcattgaaaaattaaatagatgcatttagttgctctgggtgaatgattggtctttgaaaaatgagagaggtcttgggttgtgtgtgtcacacaatcacatgcattttccattatgtttaataaaatttaatttgtgtgtctaactttttgtggctttaacatatttttattggtctgataaaaaaaatgatgtttgcaaatagtggtggtcgtggtataaaaaacaacttttttatggtgcacatttttaccaaacaaattatagctcgtgtacttaccatgttttatctgtgagctagttgagaaaatataatttgtgtcatgcttttaaagatatttcacttcacacacatgaatctgtcaaaagtgctagtgttgttagtgtgacaacttacctatcagttcattactccctctgtttcacaatgtaaatcattttagcatttcccacattcatattgatgttaatgaatctagacatatatatccatctagattcattaacatcaatatgaatatgaaaaatgctagaatgacttacattgtaaaaccgaggaagtaataagctaatcccaagaaagcaaataactttcgtgtatattcgatcggttcatattatacttaggctcatacaatgtatcgaccaattatattgttggtgttgtagtagaaatatgtttctgtcagtttcactttgcttgtgttgttcgtggtatcaacctagctattttgtgttggtattatagcaaaaatatgtttttaccaattttgctttacatgtgttgtttctttgtactgaacccacgtgccaatgcattctactagaatgtgatgaagaaatttcaatatcatgaataggtttctctcacaatacatcaatgtgtactaactagaggaacacaggaaggccaccacggtgtgggccaaggtggggagcattgaggaccgcgtgctattcctagacaagtaggggcatgggttctcgctagagcccaacggcgcgtcgggactaaggcaggattgcgtctactttatgcatggacgtggctggattccgaggagtacaagttcctttatcggtatagcatggaggacagaaaggttgatagagttgtgtcgctagtccacacgtttagggacacctgggttgtccctagattgtgtccctccaaataagatgcgtcccgacagcgtcgttggtttttgcggtgctccttgtagttttttctccttgaatttccattcaaaaattaggaggatgtgcttagttgctccgggtgaatgattgtcctaacaaacatggataaattttgggttttgtgtgtcacacaacaataagcatcaaattacatgtatttcccattgtgttgaataaaatttgatttgtgtgtctttttttgcagtattaacatatttccattgattcgagaaaaaaattattagtataaatgtttacatatcggtcatggtacgtaggatgctatcttagaaactactactataaaataactttatggtgcacatttttaccaaaaaattatagcacgtatactcaccatgttttatgtctatgctaattgagaaaaaaatattttttgcgtcatgcttttaaagatatttcacttccgcacacatgaatttgtcaaaagtgctagtgttgttgtttttttttgaaagcttacctttcagtccattattaagctaatcaaaataaaacaaacaacttttgtgtgtattctgttcatggtatacttaggctgatacgatgtatcggccgattgtattgttggtgttgtagtaagaaacatgtgtttcatcggtttcactttgcttgtgttgtttctggtatcaacttagctattgtgtgttggtattataactaaaatatgtttttatcgattttacattacatgtgttgtttctttgtactgaacccacatgccaacgcatcctaccggaatgtgaaaacgttttaatatcatgaatatgttcctctcacaatacatcaacgtgtaccagctagaggagcacgagaaggccgccaccagtgtgggccaaggtggagtgcattggggagtgcgtgctcttctttgacaagtaggggcatgggtttgcgctggagcccaatgacgcgtcggggccaaggtgggattgtgtctactttatgcatgagaagcggacatggctggatgccgggaagtacaggttcctctgtcggtatagcatggaggacggaaaggttgatagagtcgtgtctttgcctgacacatttagggacacctaggttgtcctcggattgtgctcctctgaataagacgcgtcttggcggcatcattggtttttgcggtgctccttgtagtttttctctccaaatttcaattaaaaaattaggtggatgtgcttaattgcttcgagtagacgattagcctgagaaacaaggagaggcattggttttctatttcagacgacaataagcaccaaattacaagtgtttccttttatgtttaataaaatttgttttctgtgtctagtttttctgtggcgttaacatacttctgttaatttgttaaaaagaatatcatcattaatgtctgaaaatagtagagtagttacggtagggtgccatcttagaaactactactagaaaataacttttctacggtgcacatttttaccaaacaaattatagctcgtgtacctaccatgttttgtctatgctacttaagaaaaaataatttatgtgtcatgctttcaaagatatgcaattttcgcacacatgaatttgccgaaagtgctagtgttgttattgtgataacttacctttcggtccattattatgctaattgaaagaaagtaaaacattttgtgtgtatttcgctcatggtatacttaggttcatacaatatatcgaccaattgtattgtttttgtggtagtaagaaacatgttattatcggtttcactttgcttgtgttgtttttggtattaacctatctattgtgttgttggtattatagcaaaaatatgtttttttaatcgatttcactttacttgtgttgttcctttgtactgaacccaggtgtcaatgcatccaactggaatgtgacaaggttataatatcaggaataggttcctctcacaatacatcaatgtgtacgagctagaggagcacgaggaggccgccacgatgtgggccaaggtggagagcgttagggtccgcatgctcttctttgacaagtacatgcatgggttctcgctggagcccaacgacacttccgaactgaggtgagattgtgtctacattatgcactagaagcggacgtggttagttggcgggaagtataggttcctttaatttgttggtatagcatggaggacaaaaaggtcaatagagtcatgccgctgcccaacacgttcagggacacctaggttgtccccggattgtgcccctctgaataagacacgtcccgagggcaccattggtttctgcggtgtcccttgtagttgttttcttcgaattttgattgaaaaattaggtggatgtgcttaattgctccgggtggatgattagcaaagaaataaggaaatgcatttggttttctgtgtaaaaaaacaataagaaccaaattacttgtgtttccttttctgtttaataaatttgatttccttgtctagtttatcaaattttatcatgtatggaaggtttttgttttgttttgaatcaaggaacacaccacgaaaaatactattttagttaatggcaccagcatgtcgtgctgtttgaaaatttggagcatttgacatgtcacggagaccatcctctcatggcacacctatctctagagcgtgtaccgtatcacaaaattagtgtttgtggaaaaaaaaatgcatcacaacatattgccttttttttcctcgtgatgtggcatgctcacttgtgttgacatgtatatttgaaaatgacaatagttttggtatgcctatgatgcaataccatgctcgtggtgttacagatgtatcaaacaactaaacatatgctagacaaatgtcatgacaccacactatgttttgcctcgtgtgaatcttgattaaatgtgaccgtcacagacttggggtcctacatacaaaaaaatgcgcatgattagagttaaggcaccgggtctctttcccccgactcaccaaaagatatttcgtgggacgacgtgtgaatggacgataagaagttggcatatggggttgcccaggggatgacgctcacaaacatccccgggttccaaggggcacgacatccctgatcgaggttagacacatggccaggagagttggaggctgtccctggctaagccaggactggtcgcatagcgtgccctactaggctaaagcagggctgagagagccatgctggagctctatgggccccacaccccgttgtaaccaaaagcacggaatctatgtgccttgtcgctgtaaccaatagtgacatcacactatggacaacatgtcaaagtgccttaatgaaggtagatttaagaaatcgtgcgagtctctctctctctctctgtgtgtgtgtgcgtgcgcacgcgcgcacgcgagcgctcgtgcatgtgtgcgcgcgcatccactgctcactacgccgtccaattagagggtagttgggttgtcccattgccaaaaccagagaaggatgacatgagtcacagttggcaaagcaagcgtgatgacggctggagaagacgaacaagagcagggagatttagggttcatatactcgatcgaccaatccatcttaaaaaagaaagataagagtagggttgttatcctctgagagactcaaacctaggtaaatcatcgttttgcagtaagaattctgccaagcctcaaccgtaagccccgccaaacgccaaagtatgcagggttcaccggattatggtctatttggccttgcccattgacagaatgattacgtgaaaatgtccccacattaaattttttttgcttgccttatgttcatatcacatttttttagtcacaagaattgcaagttatctaccacactattgataagaaatgttatgatatattgcaagtagcatgcttgtgagtgatatagaaaaaccaaaatcattggcttgtcaaggaattcttatcgatgagtgataagttcatgtagatcccaaattatcttgttgtaaggatgcatcacaaccaatttttcctttacttctggtgcatccgagtacatgctcttttttcttgggcattaaccaaagcgtatttgcaatataaagaaaagcggcataataaatgaacttggtcatgttgtaacctacatgatcttttgttgatgtgtaaattgcaaagtttttgttttgaggaacgtaatgatgaattgaccacttgagaatatatgtattggtttgacaaatgtaactggtttgtctatcgccactttttgttaaaaacatatgctaacttgaatagtgatgaataaaatcatccaccaattttatgagatatcctataaggaatcatccatcttaaatgggttgattccttagaccaaacaatctattcatggacccgtaggaacctacaatgttggtcttatacagtaaaaaaagataatattagcaagttactcattgcttgcctacatgcttgtggtgctttagaaaacaagagcatgccctctgatgataaaacctgtgtcactggtagatgaaacatttacatagaacaaacaaatctgaacattttgctggagcctaatataataggttagtagaagtgaaagcaacaaagaattgttaagcacaacaaaaaaaacacaattaagtaggaagtagaaactggcataccctgattgcatttattgtgtgtgttgatcgagcatggcggtcgggttcatactgtcagccccagtgactccaagcaaatcgatcaccaacataacccgtgcacattgacctcctacgtgcagtctaaataggtgggagagcaagggaggcagttggctaacaccacgctagcatgcctatgtaggagcaagtgactggtgataatggtgactggtatggcagccctagcaaaaatcacgtatccacacaactgttagcggcacaactatcaatgagtatataaagagaagatgtagttctggatggtacaataacatgcaacggaggattgtagggcaaccgtggagagagaagagcgctgtggcggtggagggtcgtggggccgaggacggacacggcaggaatccccaatccctatctatctatctattatattattaaaacagctttgaaagaaaggcatcacgttcgctgtgggggctaaaaattcccacattaatcggagaaaaagaaatgaagagtctaagtagaaatataattcaaaaatagctgaaattcggaatcaaaatgagcaatattgaaagaagagtcaatataagaactcaatacgagattaattcatacttagaataacaataaaataaaatccgaaattagaaaaataaaggagagtccaaataggaatacaatttaaaaataactgaaattcggaattaaaaataaggaatattgagaaaagagtccatacaagaacccaatacgagattagttaatattcggagtaaaaataaaaataaaatatgaaattagcaaaaagaaaagagagattagttaatattcggaataagaatataaataaaatctgaaattagcaaaaaagaaaagaagagttcaagtaagaatacaatttaaaattaactgaaatttggaattaaaaataagcaatattaaaagaagaatccatatcagaacccgatacgatattaattaaaatttagaacaaaaataaaataatatccaaaattacaaaaaataaagagagttaagttggaatacatctttgaaacaactgaaatttaaaaataaaaaaaatagtagaacactatacggtattaattaaaatttgaaaaaaaaagaaattctgcaattagaaaaagaaaaaaaatcaattaggaatacaatttataaataactaaaattggtgataaaaataaatactattgaaagaaagaccatctaaaatacatgacgagataaattaagtaacaggcctataaaggagtacagtggtggcggttgatacgacatataaaaattgttaatagaacaccaaataaaatcctaattatgattaaaaggagggacgataagtaggccatgaagcaaacgggtaaggcggttgccgggacttctagaaagtaaaaaaaaccattaataatcatattcgatttttaaaatctcaatgataataaaaaggagaagcactgggcggggtgttataggatcaaggaggccgactagagggggggtgaataggcggtttttcaaacttttggctaaaaccgagttttatatgcggaagcgtaaatcaaaatggttttgcacaattcaaaacctaaatcaactcgtctcaagtaagtgcacaaagaagctagtctatgttgaggtttgcaagcctagggtgataatagcacaaataaagtctagtatgtaaacttgctcaaagtaaatttgcacaaaataaaggagacaagagacaaggaattttcaccgaggttcggaaactcgccggtttcctaatccccgttgaggcgagcccaactctaccgctccaccacgaagccaccacacgcccctttcgtcaaggggtgggcaaggcgggggccggcccacggagaggactaccaaagccttgatcactagggtaattcttccttcactccgaaggtggtgaactccaaaccactcacaaccggcgccgggcctcctccacaatctcctcggagaggttaccgggcaacacctccacaagccgtctaggaggcggcaacctccaagagtaacaagtctaggatgcttgccgaggatgatcaagtgccacactagctataacaatgaagcaatgcacttggattggcttaactcactctttaacacctcactagataaactaagtgcacaagggtgtgagagctcttgcaagggttcaagataatgcaatggagtgccaaaatcttgcccttgctgctggggagtggatatatatataccccaaccaccaaaactagccgttggagtcgaaatccccaactttgtgctctaccggtcagaccgccatagagtggcatgtcagaccggactactctgtaacggctagaaaactagacgttacagggcaatcattgagcccactcaacttggccggtcagaccgcagtgaagtggccggtcagaccgtccacggctcggtctaaccggttgcggctctggcggctttgtatcgccaccaaaaaccaggccagtgcaatagaccagtagggccggtcagaccagccttaccacgccggtcagaccggctaatagccccggtcagaccgacctaaggtccacggtcagaccgcaggtcacttttcagcacaaccaaccgttagtaaaacgacgatatctcttgactcggatctcagaatttggcgttctcggactctatggaaagcttattcaaagggctatctaacccatgaacaatccatccaagaaacacaacttttctcagggagaaatggctcacactccaaaggatactccaccggacataaccacatgaggctacccaaacctataggacgtgcccacttctctctttgtttgggacttgataaaactcaccacacttggctagacaagcccacaaaatgcacctatatgcatatgaactaatatggcacaaaatcatccacatgctcgcttcatagacccctcttgatagtacggcacctatctagtaaatccggtctacaccaaacaccaagaccgggaaaaagactaagaaaacattcttagctccattatacctttgccttgcgccatccaacttggggtcaatgcttgagccaacatcaacacttgtgaccattcggttgaaccatgtttatgccgaggtctttaccatcctttgtcaagactttattctcatcacaagcttgacttcattcttgccaacatgacaatgtccttggcttggtgaccattaacccatggtgtcattcattagcctcatcgcaattagatctattcctttgcacggctcaaaggaaaacattaatcccaacaaattggttggcatcctccacttggtgaccaaccggttgcatatgaaagatatggatatgtttgttgagtattcattaacatcataagtgtcatatactcgtatgcaagctcaagtgcaaagatccgatatatataataggtgaacaacatggatctaaaacatgcacaataaatgtataggatttgctccccctaagtatatgcatacaaagaaatatacaagagagacaagtgtatgcataagtaaagaagaaccaatgggggtttatcctatacacatagagaaggcatatgtagtaatgatgaagataaacaaaaaaacacataccttcatgatctccatgttctcaatgtaaaggagactaaataagataagactcaagtaaacattagtctcacacttatataacaataacatggaaatcatatatatgaacctatcaaaaagtaggagataagaagtgatacatatcgctttatctccatgaatttcatccttgtcataattaaggtccatcaccaaagaatgcatatctaccacatctcattatcgggaaataaccttgttgaaaacttatgtaaaagagaggttaatcccataaacatcggtttatcatctatcaccaaagtaacaattacacaaattgtttaatccaagatcttttaatcttttctctcttttgtgatagataataatccgatataaataatacaaagagatgagatgaaagataatttcaaatcaaggtagagatcttataatgaataaaatatagaataagctccccctcaagatgtgcatacatatggatatgaaggaatgcatatgcacataatcaatcaagatcaatgagggagctcacactatattttggatccacaagagagaccaagttagaatatgtgaagtttaatacatacctcccatcatttttactttcatatccaaataagactagtcaaagaaaggctcataaaaatgttagtctcatataattagatttgtcattaatcaccgaaaccaaattaaggcacttgaacttacaggtgtataggagtatagttgcagagccgccgacggttggcaagacttctagaaaataaaaaatgaattccaacgatagttatgctcgatttttagaattccaatgacgataaagagtagccggcggataggttgtagaggagtatagtggcatcgtttgaagtgacttctaaaaattataaaaaataaaactcagcaagacaataaactctaaaaactaaaaggtccaaattttaaaggtttagaacttcttaaaaagtaaaaaaaacaatgaaaatcatgttcgattttgaaatctcaatgacaacaaagaagggaggcagcgggagagccatagctgctgacggtttggcgagacttctagaaagtaaaattgaacctgaacgataattatgttcgatttttaaaatcccaataacaataaagagaaaagatagtggatgggccgtagaggagtataatggcagcgtttgacgggacctctagaaattataaaaagaaacccaataagacaataaactctaaaaaactataagatctaacttttaaaagtcccgaggagaatgaatagaaatagtggtagatcgagtaagcaaataaagaaaacatgaggatgataaggtttgatcttttaaagtcttaagataacgagatagctatttaataaattataagtaaaatcatacttaaaaaaatatatgattttgtttgggttctagccgcgtaattgcgtaggccacccagctagtttagtgaaagtcagagttttaaatagggattgtgtgaggggatgaggattgaggaatcaagacctaagtagagaggagccggcaaccggaatgggtatggttaacagattggaaagaacgactcaattgaggtgagcaaggaaatccgactgctgttagcgtgaggcaacaataatgtatagtgttggagggttgtttttgtgaccgtaaaaactgggttttatatgatgtgagaggttccacatgttttagaggtgttcttcttgttataaattaacgaatttgttatatcatgacaaatgcctcctttctcattttaatttctcggtgtattgctggtgcaaatgtgtgaaaacgcgaaaggaattcccggtattgccctacagaaagaaaaaagagtgatgtacaatcattatcgtgtgcaagaacaatacgaccctatttagatccgacttcgatgtgaagttcttcagacttccgctgaaatttctgcgttatccaaaacgggcccaagcggaaagaggcaaacagaacaggcctttgtttcctacgatcagaggaagaaaactgcgggacaactcttgcaaggagtacgtgtacgtcatcgccatctggaaggcccaaaaggaaagcgcatgtggctcaccgcgaggcctccacgaggacgccgaacccaaacacaagccaatctggctctgccagcccatcgccacgatgccccgaagcacgcacacacagatgggcggcacacggtcacacacaacctcacgccgtttgctgcaggagaggggaggagccggccaccgaacccgagcccccaaagcgcacgccagtacgccacccgcccaccccgcgacgcctcggggcggccacggaggcgaagccaccagcgtgttcttgttccctcccgccgacggcgcagcgcgcgccacgtcttcccaccccccccccccccccccacacgccgagtccccaactcgcgaataaatcggcgagggcggttactgcgatcccttcaccgcccaacgccattccgaaccaggttcgtcgtcgccatggccgcaacgggctggtccgacctgccgtcggagctcctctccgagatcgccggcggcctcgtcgagctgggggacatcgcgcggttccggtcggtctgctcctcctggcgcgcggcggcgggtggggcggcggccgctcccccgccgcagccgccgtggctgcttctcccgtcctccccctccaggctcttcttctgcccgcgggaggaccgcctctacccggacctgcggatgcccgccctcacggcggaggcccaccgccgccgccgccgccgcctctacgcctccccgcacgggtggacgctcgccatcgaccccaccgacctcgccgcgtcgctcctccaccccttcaccggcgccgtctgcgccctcccgccgctcccggccttcttcgccgagacggacgacctggcctgggactggtcgccgcacggcgtcatggcgtcctgcggcgagggactcctcttctacgcctccgacccgcccgccgccgcctgggccccgatccccgccatggccgactgcaacgcgagcagcatcaactactccggcggcgagttcttcgtcttcgaggaggacgtctgccgcacaaccatcgtcgacgccctcaccctcgccatcgcggccgtcatcccggcgcccgccgtcgagctcccctccgaggcgcgcatcgcggtggccggcgacgagctcttccttctcgtcaagtccaagtggatgtacctcttcggcgacgacatcgacttctccaaggtctttcgggtggatcaccgcagcgttgactcggcctggcaggagctcaccggcatcggcggccgcgccctgttcgtcgattccctccacgggttcgccatggagaccgcgggattcgagaacctcgagggcaacaccatctactccgtgaccaccaaggaggtgaatgatcggcgttccaccacggtgaagtatagcgtgtcggtgttcagcctggagcaccggagctccaagaagctcgcgtgccgcctcaacaagctggagatggccctccgcggcgagacgccttcctggatcataccaagcttgaacgaaggatgaacggaatcagagattgccggattggtggttcttgaagcattcgtgatcgacaaatctctgcctcggtctcggtaaattcttcgttacccttgcagttgcatcagcagggtgttcagcaaagttggaaatcaataattctgtttaatatcttgttctttgtttattttttattttgtacatcttgtccattaaaatatctttatttctgaaactatatcacccacgaagcttagtttcctcagttgtatttgttgggaacttttaagtttcgatgtccactgtcaatgttgcccttgaataaaggtttatgtctttgttatattaaagttgagttgcttcagttcatacatatggctcctggaaaaaatttataacggattttttttatggatatacccaaataattgacatggatatacatgacgttatggatttttttggtcaacttctgtaatatcagtgtctgccaaggtgatatcaatttgcatcaagttgatggcacatttcgccaataggtgcgggaggccgcaaatgtgtggcctactggccttggttgtgctcaaacgtctgaatttgtggtgaagcttttgtgatgtgattgctcgagtacaagcagtgatagcccatctgcggatgaaatcgtcctgaaatggatgtgcaattcctgattcctgtacgtggggcaaagagctgacagcaaaataaggagatagagaaaaggatgataaggagattacgcatgggcggcagggaaaataattatgggatcagttatgtgcggcgatgaacaaagcatcaaattctctgaaatcctttacccttcctcctcaatcttctcttcttcatcgataaatctaagtgaagaatcagtatgcatagccgtggctgactcgtccatgatagcggtagctggaaagagatgctgaattatgaagaaaccctgttgctggaataagcaggtgttcatttatttagtgcatttgcggttgcttgatgtaattaagaaataaaaatgtgggtctcgttcggtttgcaacgccctgaaccgaggcaagtacccgtaaacatcagtgttgtccacaaggaaaaggagctgaagacgactgctgcatctcttgtcctcgggccttccggggcactccaaaacacctaccttttggattctgtagtctgatacgcaaggttctctgatgtttcagctcgcaacatttctcgatgacgaaaccgtggtccaaccatcaaagtactaacatgcctgaatccatgtatttttcatggactgggccagataacaagaagctcacttattaaggcttcttttaacagaatcagccccagaaatattgggcgtggtccaagaatttgggccatttgagaatcatggatgggccctacactccaggggaagcgtacatttaattctttttcgcgaacgcatcgtacatttaatttaactttgatttgataatgttccaccatgagtcccagacccgcacacattaatgaacttgaactagcgctagcctcgacggctctagcgaaaggcggcgatcgactcagacgaaaaaaaaaactttgggcctgtttggttttttaccctactaaatcttcagtagcgtcaaacttttgatatattttagtactaccaattctttgttagcgtacaaatgcatggtacatatttaaattgctaccaatataaaatcaaatattgatgatatagagaagaaagttctagattagtgtccaattgttaatgggcattactaatgatttggcttcaatccaaacatacaatattattattcaagatacaaataaattggtgaagttacattttggcttcaataaaaaatagcccttcaatctccctgccactttccttcttttccagcggcttcctgattatcggccttgggggttagatttagtcggatatctcctattctttatttattttaaaagagtcacccttctctctccggcggcatcctggtcgttgttgtgggaggagggttcggtcccttctccactaataaaaatagtttagatttagtcaggtctatcctgttctttatgtagttcaaaagagttgctggtgttcgactcttttttctcaacttgatggacatggccgatctcatcggtgttcttgttcagtaaacactgggttcaccttcaatgccttcaatccggagttttgttattttgcttagaattgaaggacgaaggcttgtcctctaactcgttgaacagaaggttgtgtaggctgtttgctccatctaccacacttacgatggtcatatgccccgtctcctacatcagttttgcaaaaggtgacggatgatttcttctatgggttaaggtggcttcaatctctgtcaggagactagtctagggtatgctcatcgactctaccaattgcacctaaccatggtttttctgcttctaccgtcgctgtgcgtgaggatcggcgcatcgttgatgtggtcgttgtaaggatctagttatttttctgtatccttttaattaggtctttctttgcgtatgctatgtttgaagtgtaatttgaccatcacttaggggcttttatgcaaaactagctatcaatgtactttatcctcaatcaataaaacacaataacaaaaaaagagctagatctggtgccgtactaaagtagtaatagaagtgtcagcaactcaagtcgatttttcagatcattaatatccgcagcacacattacaaatcagcaagctttagcaaacaaattacatgctaattcagaaacacaaagcaccgcaccacatatagaataattaagcagacgactcgcctcccctatgtaacctggacgagccgcgcgtcgtacgtgcgccacaccctacataccgattagaagaaactcgcagctaacactacctttgtttggggagctggagaccccctattctcttccggtttctgagaatcattagccgcagagtccagaaaatgaactaatataataactaaaagctggacttattagtttctctggaatctcactatctgaatactcattagctgtcttagaatcttcagctctccaaacaaattgcatttcagttagatgtcaccggtacaggcagccccggtacgccggcgtccagtagtccatcgcgttgccatcccggtacacttcgggcgtccacgagacaggcaccaagcaaagccccctattcctcaggtcatgctccatcgtctctcccttgctcgcttctgcttgatctccccatggaacgctgttaccctgaaatcaaacatttcaccacacacagcttgtgattattagcctcacagtactggttctgaatttctgattattagctagcctgtcggctacaagagattctgaagcttaatcaatcatgtacctgcttgttgctcctgctggagttcgtgtacggctcacttagcaactgcacacatagtataagaaaaggaagatgagaggaaggataatcagcacggcttgagagctcaaaaggggtcgttttgcgaaatgattgcaacatgcatgctgatgctgtatacacgtactgtccttttctcatgttttcgtggctgttgagaggcagtacaagttgagaaacattctctactttgctcttgggtgtgactaggaagcccactgacgaaagggagcactaccgggtcaatttttcatatatggaaccagctaaacagtcactgcaaatgatccattgcatctctgaagataccacacgcgaggatttgtgtgtgtatgtacgctgctcacctgtagtacacttccgttttactactaatgtcacggtggtcacaaaaatcatgtgcttttctggaagatttatagctaggtcaaaatataggagctagtacctaacctttttaatccgtgaggtcaaggacctgctatcaggagatagggagattaaattcatcgagggccataggagccaaaacagtattagccatattttagtaaataaggcttggtgcgagtctgtttcggagctctggcctgaaaattcttgtaacttaatttgtctcagatatggtgtgtgaggaagcttctcatgagtaatatattccttatttccccgaaaaaaaaatataggagctaatacataatttgcatgtcgggatggttgcaggaacggaattttacctgtacttgttcgtgcagaaacttgatatacttgatcgtttcaaacagtaccgatgctgtatccgtctggtcatgtggtgcaatgcatagggagctgagttagattatacagaagaattgcagtttcacactatttgcagaagaaaaatcaatgtagtaattgcagacatatgtaacctacataccttcccaaacggcgaaacgatttgctgaagtgctgtgatcttctcccctagctttactttaggcactggttgctgcatttggttccaaattaaaacgatcagttcgttcaaatactgaatatatggtcggacgatttcagagataatatcaaatactccatttgtcttctatgtgttgttaccttaggaggtgatgctttggaagcctcttgcttggacttcttgacagtgctttcctgcctttcctctgacttcctcttcttacgatcagtcgccgccgctccactgccgctgctactactccttgcctgaaacgagataattaattagcacaacgccacaaacatgattcaaaatccacgcgcacatatgcagatacaaaactgcatatattcagttatttagtactacgtactacaagcaggcgttttagtactacgtataggactactttgcacttattcagttattctcactggcctatttatgttgggggtatgaaatggcacgtgaatcttaccgggacagtctcctgttcttgtcgattgctgtcagacgaattggcgcatctcatgtacggttgcaccgacgtcgactcgatggccggcgtgtagccggcgaatgacccaagatccggcaagctcctcatgccaaaaggactagcctccatttcccggccgtcctggcagcaaatcttgtcaggctgatctcctaagcctgaataatccaggctactgttgtgcacgccaacgctagcactgccggagcttatttgctgcagaaatgaggccatggggctaatcgcaagctcgtgctgctcctgctgctgatggttgcagctgccttccttcgtcagctgatgatggtggtggtggtggtgttcgccgtagcatgctggcgtgctactcatcatggtcatgtcctggacctggaggacggtgttagtgccacccaagtacagcggcgagccggcgatctcgtacttgatcggcgagacgtcggagcgagcatgatgatcgaacgaccgtgccgtcgtcgtcagggtcgtccccgcgggtgcgacattgtagtgctcggaggcggggacttcctcgaacatttccggcgtcacgttcttcgacgcgagcagatcgaggaagttctccctgtagccgccgccggtggtgctgttgcttctgaaaggaggaattcaccggcgttggaattgcgatcatttacacaaagcatgaaatatatagagctagacagagctgttaattagaggactcacagttcgccgtggctccagccgtgtccgtgggcgtgctcgccggcagccgggagacgcatgacgtcggtcgacgacgaggaggagtcggcggcgaaggccgagccggcgagcgccgtcgacccggagtaggggctccagtaactgtagggaaaagaggacgagggctgcaaggccgcgtgcgtcgacagctggtgatgatactcccacatggtggcggcggcggcggccggcgaagtggaggcgctgcacgcggtagccgagtcggcctggtggtggtcggcggcggcggcggcggtggctccctgctggggcatgaaatactggagttgcactgcgccggcgtgcagacgcatcgcatgggttcggagctgaggattggaatgtggagtggaccaaagttggtgctggggcctatttgtaggcgcttggaatattttccggtggggttatcgaggaggatatgtgcttacgtcggcgtgatgcaagcatgctgcaagacatcattgatgagtttttttttttttgcttcttttcttttcaatttataatatgcacgctatgaagcagccatagttaaaatgcgttagtgtaagcatataatttttatagctaacttgtatagggtagcgaccctgtcctttctcagaagtatacctttttttcttttttttgcaaatcttgaagcaatctggttgttggtggtggtacttctgaatttgaaagtgctacttgaagggcctttcaatcagtctacttgagaattgagatgttatgtggttcatcctgggaggttcaatttactacctatccattcgttagctagctggagtatcaatgagtaaaattcaccggcagttcttaaactaattgcattgtcatatatgtccctacacttcaaaaatacaaatcaaggtctcaaaactcgttaaaagtatgtcatctagatccaaaactcttcaggtgcttgcatggttgattgacatttcactctcttaatgacactcaaaaggtgtatgtgacagtttcacgtcagcaccatgtggacttgaaggggtatgcggagttttggacatagatgacatacttaacaagtggcccggaacttgcttgctatgcattttgaaggggccaaaatgacatagcatggtaagttttaaggaccgtcactatactttatgagtttacattcacgaacgctttacttgacaacttattggattggatttaattctatgccaggtaatggtttgaggacgacaagagagttttgggattctaaaatctatctattatattattaagacagctcgacaaggaggcaccacgtttgttgtggaggctagaaattcccacattaatcggagaaaaagagaaaaagaaaaggagagtccaaataggaatacaatctaaaaataggtgaaattcggaattaaaaataagcaatattaaaagaagtttccatatacgaacccaatatgagattaatcaaaattcgaaataaaaataaaataaaatccaaaattagaaaaggaaaggagaatccaagtaggaatacaatctaaaaatagctgaaattcgaaattaaaaataagcaatattgaaagaagtttccatataaaaacccaatacaagattaatcaaaattcgaaataaaaaaataaaatccaaaattataaaaggaaaggagagttcaagtagcaatacaatctaaaaatagctgaaattcgaaattaaaaataagcaatattgaagaagtttccatataataacccaatacgagattaatcaaaattcaaaataaaaataaaataaaatccaagattagaaaaggaaaggagagtccaagtaggaatacaatctaaaaatggctgaaattcggaattaaaaataagcaatattgaaagaagtttccatataagaacccaacacgagattaatcaaaattcgaaataaaaaaaataaaatccaaaattagaaaaggaaaggagagtccaagtagcaatacaatttaaaaatagctgaaattcgaaattaaaaataagcaatattgaagaagtttccatataagaacccaatacgagattaatcaaaattcgaaataaaaataaaataaaatataaaattagaaaaggaaaggagagttcaagtagatatacaatttaaaaataactgaaattcagaattaaaaataagcaatattgaaataagtttccatataagaacccaatacgagattaatcaaaatttgaaataaaaataaaataaaatccaaaattagaaaaggaaagaagagtccaagtaggaatacaaattaaaaatatctgaaattagaaattaaaaataaagaatattagcaaaagaaaataaaaaaagagttcaagtgggaatacaatttaaaattagctgaaattcggaattaaaattaagcaatattaaaagaaaaatccatataagaacccaatacgagattaattaaaatttcgaataaaaaataaaataatatccaaaattagaaaaattaaaagagagttcaagtatgaatacaatttttaaacaactgaaattgaaaataaaaaataaaaacattaaaagaacacaatacggtattaactaatttttttaaaaaataaattctgaaattagaaaaagaaaaataagattttaattaggaatacaatttataaataactaaaatttgtgataaaaataaagactattgaaagaaaagaccatctaaaacacatgacgagataaattaagtaacatgcctataaaggagtagagtggtggcggttgatacgacatataaaaattgttaataaaacaccaaatagaatcctaatgacgattaaaaggagggacatcaggcaggccgtgaagcaaacaagtaaggcagttgctgggacttctagaaagtaaaaaaaaaataaaccccattgataatcatattcaatttttaaaatctcaatgacaataaaaaggagaagcagcgggcggggtgtataagagtgtagctgcagagccgccgacggttgacgggacttctagaaaataaaaaaatgaattccaatgatagttatgttcgatttttagaatcacaatgacaataaagagtaggcgaacaggctgtagagggcatagtggcatcgtttgataggacttctaaaaattataaaaaataaaactacaagtccaatttttaaaggttcggaacttccaaaaattaaaaaaacccaatgataatcatgttcgattttaaaatctcaatgacaataaaaaagggaggcagcgagcgagccgtagaggagtacaatgagaaagccgctgatgatttggcaggacttctagaaagtaaaaataaacccaaacaataattatgttcgattttaaaaatctcaatgacaataaagaaaagaaacagtggacgggccgtagaggagtataatggcaacgtttgacggggcatctagaaattataaaaacgaaacccaacgtgataataaactctaaaaactataaaatccaatttttaaaggttccaagaataatgaatagaaatagtggtatatcgagcaagcaaataaagaaggagatgacataaggggtagcaactggtgtgacttttaaaaactatataattagaaatacgaggatgataaggtttggttttttaaagtctcaagacaatgagatagttatttaaaaaaatttaagtaaaatcatataaaaaatatatgattttatttgggtgctagccgcgcaattgcgcgggccgcccaactagtttagttaatgagaatctagagaggttgcatttccccacttctgcctattaattggttcatttgttcattttctgaattatgaattatgtagcttttgattcttagaatctagaatctaggtgaaaatccaaattgttcgacagagttagagattaactagagctgtcaaaagctctttcaaatagaactaatacttttggggattatgtaggtctaagagcttagctgtggctccaattggtcttgcatgtgcgacaaacccaataagatagcctagatgctgtttcaacttctagcggaaacaaatgcttactccaaaaattttcacattagcaaaaaacattgtttaatcaatgcattgttagttaaactattatttttctccttgttccgtacgctctctcgtgatacaagtggcattgcatggcatttaattggttgaattgctcatgcttgtgttggagcgcgagtgcagctagtgcttaaatagttgcccggtgatatactctctcacctccaactcactgctaaaactgatgtggcaggcttatcgctagtatactacttatactactttctccgtttcagaatgtatgcattttaaaggtagatagagatgattaaaagaaagtatatagagatgattaaaagaaggctacgattgatggagaagagaatgtaggtgaagagaatggttgtaattggttgagaggaaaggataggtcaagaaatagctttattttgaaacacgattgtgctaaaaatagctatattttgggaaggagacagtacatcacttaagataacatgatgtgcatatatatagttttacttctaaaggtaaaaattagaggcaggacaaaagcttcttaattacaaggttttatagatgcagaagaaatgggcataggttaattcagaaacttgaattgtcagtacgagacacggtgataacctgccaaccttctcactgagactgctgccacgttattcggtgatgggcgattggtccatgaaaggtgcctgtcacaactcgcacggagtaagcagcacccggcttcttgcgcatcaagagcatcactctgtcctaatagtgttctttcgtagtggtaaacactgaaaaaaaaactcacagtcacacaatagtcccaacaactcaaccgtcttcggggcataaagcaagccaaatctaggaagtaattaatcagatgtgtgcaccaaagatgtagtaccgcaaacaccggaaactcgagcatctctgtgtaccagccttgtgcttctgcaaaacccgtcgcacgctcagcagcctgcttgatatgattctggaaatgatatggacgtgctgcttagtctgctgatagtatgtcttccagatggtgaagatctgcagcatacaagtaaaagaagccactcaacttcgagacgtcatatcacgtcactttggagttctacagtggagtacattttactaacctaagctgacttttttcatcaactttactttaccatgaccatgtcaggtaacttatcattacaaaatgaagccatgggaaatcacacagctatggccgacgagggaggaatattctcagaaacagtaagaagagctactttgctccatggtcttcttccacttgagtgggtcagttgactgtgtctcagtgtcatgaatccctctgctgtttagttccctgcttactgcaccaccttgtcttgtttactctttgttctcttgctgctcggccaacaatggagcagagactgcatttgcagggccattgaacaaagagctcgccctagggttggtgagtgacggtgatggctttggtggtagtgggcttggggacaaaggcttcaagaatgcaattcattgcttcctgacgctttgcgtcacataagatgatgtgtgaatgccaggaaagtatcagcctgaaatctgaacacagattaaaatcagcggcaggtcagatgcagaaagagaagcagggaaacagcataatgtgttggctgcctttccttaattgaggataaggcatctcttcccagtgaggtactccggtaaaaatgcaaataaactgttgattaaaatactttagtatcttcattagcatgacaaatagatgtagaactatagggtaatatgctaagaaacctagggagatgaaatttccaagacaaaactgaaagggaaagctacagaatgagaccggtgactaaagcagacagttttttttttatcagggtaacaaaacgggcatcatatgtagtataacagatatctcaaatacagaaagtaacatatgagcaaatatatagcatactgatgtaactcaatatgtactctgtgattttctttccttcgcaaagcagtagtttacatgttccagcaagagaagaaagtggcacttacagctacaggagcgccccaataacagagtgatttcacactatattcaagtcagcaaattgttagcttggactgagaattactgctgtacaaaatgctgggctgctggcacagtttttttaatacataatcatggatatgagaaggttataagcactaggctagtgcaaatttaaaaaggaatacatgaaaaatagcactcatattcaaaactaagattagcaatgagcccatgatatgaataaatactcaaattagctattgacaagaactcacaatggatcacaccttggcacgtgtaaaaggggcatagtggagtataagcttaaaatgtgtcccatcacaagcagcatgcctcaaatagcctttcttcaaatcaataatatcctggggacccgcacagattatagaacaaaataaagacgagcttgaaatttaataacaggacttcagtggaaactgggattgctcataacacttgtcagcatatgatcatctggtccacactcaaatggttgagcaaatggcctccaatcagtaacactaaataaatacaaataatttatttcctgtgctttagacttgccacagcggtggttcctgctgacaattatgtgaactccacttccactatttaattctcagaaaactcatccctgatcacttgcctgatctgacccaaaaaaactggtaatcttagcagttaaattaagaggaggaggaagcgtgccctaataatactcagtaacctaattgtcatctgggatcagctgactgaaattggttgtctcatcgagctaaaggaatgttgtgaaaggaacagcaggcacttttcgtcaggttcttgtttataaggggatgactaactttggatatcatcgaacaaagaatatggtttccaatgccgccaccctgtctccattcgtgcagtacaccaagtctgcactctgggtagctaactacacaagcatggactggagaaatttcctttcgcgtgctcaaagttagcagtgtcaaatagcaattaggttgagatgtcaacccaagtgcggtggcaaagttttcaacttgagctttgacaagagacaggaagaataaccagtcgtatcctatccatgtatttacaacatgcttaagatttaagaagaccataaacaagcattgcaggggcatcacgcctacacataaagtttttcaagtggttatatataatatctaaaggaatgactacacacggaccctccacctttaggaaagggagagagacaaaacaaggataggcagcattaagcacgcgcatcacatattctaatagaagaggaaaagcacaccaggaggaggctctgtgtacggtgaacttaatgacaggcaattgaaggagtagctttgtttactccaagttgactctcagtgaaatgtgtcaaccactagaataatataagaaaagaagcttggaggcaaggacagacagctcattctccctcaatttgaaagatgtcgagcgtgaagcttccccactaacgaccttagtaggttggtggaggatgacagcgatcagtgaaaatagcattttgcaatgagaaaaatagctgacctctagagacaaccgtgtgataatactgcattcatgcatgacaaactatgagatggatgtaagcagagttttggactcttcttgagcctccaaatctcttcctgtcgtgacatgctcacaggtacaagatcactctggttaagtcaaagacgttaagcacttggaataggaagatggtcaaaagaagagtcatgtctcttgaaaggtctcacggtggatatcatgctacacacttacaccgaggtcactatacaaattggtgcaggagctagtgacttcatcaccaactgtagttagcttagagcctagaggtgaatttgactacaggacaaaatagtaattcatacattattagaaatgtcagttcataaatatgaaaagatactccggatggacatgttgagacatatacagaatacaaaataaaatatgtggatgcagatttactgagtcactaatgataactgaagatataaaatatgacagaactagaaaaggacagaggaataaaaggttacctggacacagcagtatgctgtagctcttttgtagccagctcaaatgcatcctctggagtcaagaacatctcaatgtacctaaaaatggtttcagacatatcgatattcttcttaaaagagggcaatggtggtggcagattcactgcctccacctcaccaagtatagtaacttcttatttaccatctactccatcatgttttataccaactaccccatgtacttttatgttataaaataatccctttacatatatgattatatcatatttcacctgtacaatataacatctacaggtacaaaattgtcccaaaaacctcactattaatttgttttaatccgtagcaaagcatgggtatctggctagttataaactaaagttgatgcagatagtaaaagatactatatgcagattcatttggcaaagaatatgcattaatattagaggcaatcaagaagatttacagtgtcaaaagggccctaacattgatcaaatatatagtatttgacatttaagtgcaactgcatgattagtcctccacagttgagaatctaggcttaggttacaacgttcagttggaacttggaagtgtctgatgactgatggcatacaaaacaaatactcttaatcttcataggatccaaagagcaagtcagaattccgactccatacttgttcttttttccaccggcccagcaaaggagtttttttttcaatgctttcatactgctgcattgaaaattaagagttaaatagaggacaaataaagaaaggtgcactttagtaatactctctctatttcaggttataagatgttttgactttggtcaaagtcaaattgctttaattttgactaagttcatagacaaatatagcaatatttacattaccaaattagttttattaaattaataattaaatatatttttaaaataaatttatcttgggtaaaaaatattactatttttttctataaacttggtcaaatttgaagcattttgactttgaccaaagtcaaaacatcttataacctaaaacggagggagtagtatgaatcaaaacaaaattccatggcatcacaagaaaatcactacacctgagaaaaaagaaagaaaatagcatctagttaggttacctccaaaaacctatttaaccaaacaaggagacatcaagatagtgctgagtgccatattgttgctgattcctgatatgtacacctccagagggcagtacccgtgctaagagaatacacgccccactacaaaacaaaaatgtgtatattccacattgcctatccgagggcttaacactggcttcaatcatcagctgaactatcaattcaccaccagcataacagccatcttgcatccaccacacatttcatagtcactaacactggaccaccctaacataacaccatcggtgacagcaatcacacaaaaccatccaaacagcagcatatacagtccgcaattctacaccacaaaaagaatacgaggtacctacttagcatagggcccctatgtaggaagaaaagtagtggacagggatgaatgtggcggtacgcagcctacacatcctcacaacctaatagcataatacagcataaatggcagtagctattccatacctaacggtgcaaagccatcattttggttataccatgaataatacaagctgcggagaacattgcaattttgaattaaaaatccaaactgcaatcacatcacaagtttgcttaccttctaacgattgccaaaccaatcacgcatcattatgtgctcaagtgaattgcccaaccaatcacgcatcattatgtgcccaagtgaattgctagagaagagaccaaataaagtgctgatctcgtaggccctcatctcaatccttcttccatacagatgatgtggtaatgtatttctgtactgaatcgactcattacgttccccaaactaaataaatcagctctctaaattaggataggttcagagtaaggatcaataaatcagttctctaaattaggataggttcagagtaaggatcaaatcgtctacttcctcgaaccgaaccagtaccaaacgcaccaaaaggggatgaactggatctagtcatcatcaaagctaacatcgtgggtaacatcaacccccgtttcaaacgattcgtccgactggccccgaaaccagcgacttgagaaagagcctcacctcacctcacttgccgcagccgccgcccggggtacctcgcgcggctgcgcctttgggtggcgccgcgggaggaacctggactcggtgggagccactggtcgacggccggtcggctgctcgtccggcaccgtcggcgcggcgcaactgtgctgccctcgatgcctccgggggcgtggccacggtgggttcgtcggctgacgcagcgcgggccgtggcggtggtggtggtctctcgtagcccagctttctgtaagataagtggcccggttgagcgtgcggcggtgcgggtgggtgtgcacgcgctcggaggtgtgaaaacacgcccgagtaccaagcggcagcgtctgtactacttgggcccgataatttgaaggtatttgggccgaaagactgttacggcggtaacaccaattcgatgaggaataagttcaccttactcgagttttgatcgtaatcttaaactaatataacacgtccttcaacttatataaaactaaattatcaaaatcacacgatagtattgtgtccgattttgactgatgagacaacttggtaagcagtgagacccatgtgagacctcatatgttagtggctagcgctttgttcctcctctttcttccctttctgctaatgggagttgtagagggagcaaacgggggatgttgaggatgaagacgacatggacgtgcgccgagtaggagcgcttgatatcgccaccgttgatgcaaccggctactcggggatactagagctatggcacgacccatagaagacgacctatgccacctgtcttcttcgacacgatgggaggatggagctatggagctatgccagtatgccacccatgcctcgattgttgcctctctccctatatcccgttggcctgctacctgcaggctaggaagagggagaaggggaaagaggaggaagaaagctaggaggggagaaaaggtgaaaggaggagaaagctaacatgtggggttcatacaggttccacgctgactcagccgccacatcaacaaaaatatagaactatactggctgggatcttagctagctacaccggtattataagttgaaggacatgttatatatgttattgtggtttagggatgtgattcaaactcgtcgttaacatgttatatatattattttattttgtggaaagatttacaatacatatccgaaagacgtgatcaagtcttcaaaaaaagaaagacgagatcaaagctaagggaaagaagcgtggctgaacatgaatcgatcaatcgcgtagagaaaaaaaatcactgcttcgggccagcctcatccgcgcctttattttttttttcatgaaaccacagatgcagcctctgccatcgatgtccagagccagtccacgacacaacatcgggtcccgttcgtcggcgtacggatcggtcgagttggaggtggccagcctcaacacggctgcgcagcgtgtctcgcccacggttttgtttctcgatcgacaagtcggcaagacgggaatcgtcgcatcgtggacaagattgtgaggcgcttcggtcttcctgggccatgcttcgtttgggcattgtgcggcccacggtggtgttcccgggcgcaacatgctccctccacttcttgctttccgggccacaggccacagttgttctttctcgaaagggatgtgtgttgtgatcatcattcatactaagaagatctaatcgtcagtccgttgttgtgtactggggtttatcccctaatatctgttcttgcttaataaagttggttgtgtttaaaaaaaaaggttatgaagaaaaaggtagttcgacaaagcatatgatactctttgtcgtgtcaaagagaccaagataagtacaggagtaatcgtacagctgcccaacctaatcagcaccggtgaccgagaaaagctcgttctacctctcgacagatcgccgttagctagctaccgagcatagtcgcccatcgtaagtactagtacttcccattcacgcatacataaggacattcggaatcattttctttctcttgaacttcgatcgtgcgactgttgaaacctcctttgttgcatgctagctccatctgtcacgctctggctgccgcgtaggctggtgcatacatctggaggaatctttgcgctgcggtgattattagtggggtcgagaagatgggcgccgttctgatggcattggttggaaccgcccgtgaacactccagcagtccagctccatgtacctgatctgttctctagcttgcttttccttttcagagaatatcacgcgttcagcccgcttgttgcactgtaacgcggtcagtgccaccatcggagagggacatcgacatgttacctgtacggctgtgctcaatatataaacccgtgtgccgtggtatgtataaaagatctacggtaagtactggtttcatggcaattaatcgttgtttaggattttttttaccttttcgaaatgtaaataaaatagagggactggaattaggttttttttttggaagtttcgaactaaattaccacacaaaacctggaaattgggccttttgttaaatttaaacaaattctaaagctggaaagtagaatcgtcgttgatgacgtatgttctcattggtgatcgacgtaaggcaacagaaatcggtcattggtctccgtgtatggctgtatgcatatgcaagccccctgcaaaaaggcgcaaaagagtgtatagtacggtgaaggaacggcccagcgcaggcgcatgcagcacatgcatgttttccaacagcgctcgcgctggaaagtagtacgcgttcgtacagtatcctgtttgacattctagttgtcgggtggttgcttcggcctcttgctgtccctcggtccctaatccttcgcgtacgttgatccgcgatcgctcgtcgactagcggaagaacaggttttcaatcgatggagtacgcgcgcgcggtaccatctgctactgtagctagcactcgatcgatcgatcgattggcgcggcggttgctagctgcgcatatgcttagatgcaggctgccgatcgaaagcctgaaacaacgttacttgcgttgcaacttgcaaggacgtcatgcgcgtactcggttcttcaattgccgtgtactgcatcctagtgtcggccactttttagccgattttatctgcatggacggacttgaattgtgtgtttatgtgtccccgtgtttcgttgggacttaggacactaccgtgtttttttcttccttgtttgcgaagcttttggatgcagtatcaatctcttccggaacaccggcccgtgaatacgcactgagtttcggaagagagagagattaaagtgtcgcataattgggtttcagatagcagtacaagttactactgaaaagattggatttaacgtggatacctctctcggtcctccacggttgcgtgttaaatatgcacaggaacagcccctggcgtggcacgattacagcggagagattacaacaaatcttatcaagattaagagataaacacaggagactaacaaccatgatctatccctcaaagttaggaagctaatcctatcactaaccgtgactagatagaacaaatcttaacacccccacacaatcacaacacaggcaacaagttgagattgcgcctgaaagcatccatttgttgagcagtgaggactttggtgaaaccatcagcaagttgatcccttgtagagataaacctgatctctaatagcttttgtgcaactcgctctcgcacaaaatgaaagtctatctcaatatgtttggttcttgcatgaaacacacactacactggccaaggtcacctgtgacgggcccaaaccctcatctttgacggcttcgcgcatggtcagtgatcagtggtcactggtgagtccagtcacctttgacgggtggccggccgtcacaggtgacacccacctctgacgggcaagttactagaaggccgtcagaggtgttggtctccgctagccttgagcgagttaggacccgtcacaggtgactcatctctgacggccctttaaataaaggccgtcagaggttgaggtctccgtagttagaagctgtcacaggtgatctacctgtgacagccccaaaagtaaaggcccgtcacaggtaggtcacctctgacgggcctttatttgctagtccgtcacaggttatgttacctttgacggatttttgttccgacccgtcactgatgagttaattccagaaaaaaaataaatgctaaatattggctagcctcaggatttgctagccatgccctctgaaaaatagaaacatcacagatatattccagtcacagatccatcacagatacatcacccccccaatataacatcacagatccccaacaacacatatatgcagttcaaatgccaccattttgcacagcaaattcacaccccttgaaagccacaatttcggtcgttgctcatagaaccgcatatatacttaccaaatggattaaagccataatgtcatcgacctgcacaacctgtcaataaggaaaaaaaaaaggagaaaacagatgaatagtacaacataaatcgtagttgatcaaatgtgatgacaatttagtaaagtaccataaatattgcacatatgaaagtaaattacattgcactctataaaaacataattttttacatcgccagaaattataaaaacatcttttttacatcacaataaattatctagccaagttcatgagtctatttggcatgaaaacgtcctttcttgttcattatttctgcaagaataaaggcgcacaattcgcctctgatagcgggggggttgatgggtgagatcttgaagccagctctacatttctgtttaataaataagaggttaattagcacgttttgaatagcaatgtagatattgaaatgagcttattcgccattagcaacaacctcagggtcgaaatctttcacctctcttagaagtgttgacatgttgtggcacacgtggaaaccacattggtctccgatctgttgtgcgcatgcaaacttggtgtcatgataaagttcattcttgccctccttgtgcctaccacccttttccacatatgggccccaagccatatttaaggccttggtgatttcactgaaatcataatctttggacttattggagttaaggtaggtaaccctactccacttaggtacaatgactaggagaatccaatgtcgcctgcgcagtggttatgtagcgttagtactaagaaccttaacttcaaaaacaatatacacgaagggtattgtcctcttactcttggttgtgtgcgcacatgatgtactccttgtcttgatgggcccataaacaccggttgacatagtcaaccacctcagtgaagctctgtcgtaaattaacctcattcaccatggatggatcaaggaacccaacctgattaccatggcgacgactctcgatccaacacaaccttaaaatatttacgtattagaactaatttaattaggagatatagtccagtcatatcacaagtatagaaggtatgcacttacaaggagtagcattttagaagaccagtgtccaacttccggatcctgaaaaggtcgaagaggtcatcaaagcctatagttatataggcaggcgacgataggaacggctggtggtcgtgatgtccaactatggatgactccctcattttccgcttggcattgcttagctccatgtattgcttatgtagctctcggcaagcaatacccatcacagctaacacattgtcctccaccaatggcatgcctagctcaaattgggctggcgccctcacgaccttccccgatttgctcaccggcatcgacgtcgcagccttgcccctttttggctccggcgccaactccccgaccttccccttgccgcgttcacgcttctggcccttgacaagtggtggggagctatcggcctttcttgtggtctttattggagccaagctttgagctatatctgccaagtccatatcagctccaccaggagaatgaggtactgacaatgccggtccacggggagcctcaattgatagcttacacttgggaggtgtaagctccgtcggtcgacttggacgaggagtcatcttcacaactatgtcttctttgggccattgtatgaacgtcttgcgcgcatcgcccaaagtcatgatttcatcatttgggggcacgggcagcggatagcctgaccaggtgtcctttactgtatcgatggacaccttggcatacccagctagcaggtctgcgccgtggaccttgtctgtaaccgagggcttgaaagccatgccctcagcgacttcaggagcgaaagttgggtggactctcgctagtaggacacactgtgctgcgccctgcataaggtgaaagtttgaatttaatattggaatgtgtaaatgtcttttattagatatggatcggataacaacaattacctcgatgtggtccactgcagctagtggtgcgatcgggagaccaggggccggcacctctgtggatgcacaactactcctatgctgtgacggactcgcgtcgtgttgtacacgaggagttggttgcacagcaggtgttgtgactcggggtatattcatgtcggcgagcaccttgttaaccctttcttccacccttgcattcatgctagcttctagttcttgaatgacctcaaccttaagttcagccttcaaacgagcgtccctctcttccttggagactttccgtttcctgtattgggagctgtactgagggagtccatgcttccagggcacatcgctaccaattccccgagttcggccaggatgttctttggttccgagcgcctttgtgaggatgtcatcttcgcgcctcttcggcgcggactcaacctcgctttgtgaagcttgttcagcaaccaagcccaactagaaaagaagatagtcgtttatacgaacttgtactttatacgaacggaaattagttaggttaagtagtgaactcaccagttcctgatagacgacggcatcacttttgttctcaaatgtgacagagccgtccgggttgaccttaccccttgcccgcgcccagttgcgagctctttgttcagggatgtctgaaaacggggcagggacattcgctgctgcagcggctgcatcttcttgggcccatattgcctccttgccgatgtaccctgcggtgcccagccgatgcgggtgctcattccgctgttgcagtacgcgatgtgcctcgctggattccctaaactcttgggtggtcttgagagagcagaattcctcccacaccgcttcggttatttgatggtattcatcgaacggcgtatgattgccgggcgggttgacatactcggtgaagagcttcgacttccaattcttccaagctttgcccatcttttggaatgccttccgcttgagcctatcctttgcttcggctggaaatgtgaaccatttctccattgccgtccaagctcgctctttctcggcttctgtgaccttcccgatatctttatagaggatcccgaagttctcacgtgccactagcccgcagcagttagaccatcttccaatgacagtcctgggcgccgtgggcctaccactagcgtcaacctctcttataacttgcactgtggtcggccatatattttgtgaccgcggatttctactagacctacttgcacttgtctcgcccgacatcgacgtatgttgttcctgcggcaattctgcagcacaaacagaaggcaatatttgctaaggggtgctagctaaaatttatgtggtcatgtggtgaaaatttatgctataaattaccatgaatttcgggttgttggaccgccgttgtcccgggatgaccttcggcaattgcctctgtggctgggtttgcttcttcctggatcctcgcaggtgttggggagggcgggtttgcgccgggcgttgacatggtttaactttcgcgaaaaagattataaatttcctaccattagactaaatagcattagatccaatgtaatacggggtatactatgaaagatatggcctcagttttgctgagaaatatgcatcaattacaatcatttgcatgaagggataaaaagaggaaatcagctactaggagaaaaaagcaacccaaagaaaatagaacaagtgtagttcatctgttcttatcaataaaatagaacaagtgtagttcatctgttcttatccataaggaaaagagcaagtgcaggaaattaaagtagtagcaacagcatggccatataatagcagcaataagagcagtagcagggccatataacagcagtaggggtatatatgccacaggggcagcaacagcagggggagattcacataaacagcaacagcagggtggaaattgacataaacagtaacagcagggtggaaattcacataaacagcaacagcagagggaaattcacatagacagcaagggtatataaatcaacaagtgtagataatctgttcttatccataaagaaaagaacaggtatagatagaatgttattaagcaattcatccttggccatttaacaagaagtacaggggcaacaacagcagtggtatataaatcatgcatatattattgtagataaaaaaatgaacaagtgcagaaaatctgttcttatgcataaaaaaagagcaagtgcacaaaatctgttcttatgcataaaaaaagaacaagtgtagaggtatataaccactgaatcaatcatgcaaatttaaaaaacagcagcagcaagggtacagaatttgcatgattgacataaaacagcagcaggaggagtatatatgccacaggggtagcaacagcaggggcaaattaactaaaacaacatgtctagatatactcctcttatcaatccagaagaaaagagcaagtgcagaaaatctgttcttatgcataaaaaaagagcaagtgcacaaaatctgttcttatgcataaaaaaagaacaagtgtagaggtatataaccactctacactggccatttaataaggaacaagtgaacaagtgtaggggcagtagcaggggtgtagataaaaaaggagacagtactactaacttcatgtaaacagcaattcatccattcaattcaagcaagtctagataataaaacagcccacaatcattgtggcagcagcagcaagggtatataaatcatgtatataaacaacaattcatacaattgacctattcatagacaaaaagggtatataaatcaacaagtttagataatctgcaaagcctccttaatcatcaaattatgacagaaaacaaaatgcatggagaattttggtgtctaggtcggttccgtccatggactacactggcctatccaccaaaattccccatgcattttgtattctgtgatggtttgataacctcggaactacattaaatctgcggccaatctatcaattcttcccttgtaactagatttcaaaccctacacctaataaaggtccttaattatcaaagacactccatgaatggttatatgtccaaatggctcttaaatccacatccaagttgcaaactagctacacattcaagttttaactaacagttgcaaccataggcagcagcatgggcaaacatagacagcaaggggcaagtgtagataataaaacagcctacaataatttatgtggcagcagcagcaggggtatataaatcatgtatataaacaacaattcaactattcatagacaacaagggtatataaatcaataagtgtagataatctgttcttatccataaagaaaagaacatccactgcagcaaaattcatgctaagatcctctattgatgctaagattcactgcaccaaaatcatgtatataaaatctagcccctacattcatccaaaacatccatagacaacaaatcacatttaattcatctatacagcagcaccaataatcgaaacaacaaatcacatttcattcatctaaacaatgcaattcatccatcggaaaaaaggaggaatgggggagggtggcggcatacttggagaagcggcgtacttggagacggcggcgcagaccgtagtcgtcctggatcctggtggcggcggcggaaaggcagtggcgaagaggtcgaggcggtcggcggtggtcggggatcccggcgtcggggaggtcagggtcggggaggtcggggaagtcgatggacggacggcggagaggacgaccggcggcgagggcggcggtggagacggcggcggagatggcggtggagaggacggcggagatggcggcagagagggcagcggagatggcggcggagagggcggaggagaggttgaggcggcgacggtggagatggcggtggagaggacggcggcggtcgagagagtgagtgaggaggcggcggtggagaaggaggcggcgagggcggcggagagggcggagatggcggcagagagggcggcggcgaggagggtctggatcgagagagagagaggcggtggcgaggaggtggagatggcggtggagatggatggcggcggtcgagagagtgagtgcggcggcggtggtgcaggccggcgtcgggaaggtcggcggagagggtgagcggcagagaggtcggcagtggagaggtcgaggcggtggtggggaggtcgaggcagcggtggagaggagggcgtagagggtggcggagaggtcgagagggcggcggatttggcggcggcgaggacggcggtggagaggcgaggcggcggtcgagagagtgagtgagtgagagtgggcgccggatctggatcgatctagaagatgtccaaccctaggtcaaccctagtcaaactcacctgtgacgggctccaactatgtggccgtcacaggtggcctcacctgtgacgggcgccaaccgtggagccgtcacaggtaagaccacctgtgacgggcccaacactctgggccgtcacaggtgaggtcacctgtgacggccctacagatagagcccgtcacaggtgagtttgcctagagcaattttattttattttatttcactagttcttttattttccttaacatattttcacatacactacatattttttttatacttaattattttatttcactaacagtagtaattgcacttcattattatactactttaattattttatttccaatgcttatacttgcttaattattttatttcacttctagtgggtgcttcacttaattattttatttgactatttcataagcaatatactattgatcattgcgaacatattagagtcatacagataacagacatgtagacataaactacgtacataaattacaaaaataatccttcctcatggtcgacacgtgcatattgaacttcatcttcttcctcctcctcttctagaggtatttcttgacctatgccgtggacgtgctggttgtaatcatcctcgtctgcaatattgtccaatccaacaattctccttttcccttcacgaacaacatgtagtttcttgttacacgggtcaactatgtagaacacttgaacaacttgtttggcgagaacgaacggttcatccttgtacgcgttgttagccaagttgacagtggtgaaaccttcattgtcaacttttacattgcgaagatcgacccatcgacaacgaaacaacgggactttgaacttcaagtaatctagctccaatatttgctcaactctaccatagtattgatcacgacgaccaccgtcactagtagcctcgatgcgtaacccactgttctgcactgtgcatttgctgtcttgctttaccgtgtgaaaggtgtatccatttatgtcatatccttgccaggtggtggcactccattcaggaccctgtgacaaccactgaagtgtttcactaggcaagttctgcaacctggcaattcggttcttcagccactcgttgaaagaagacatgtgcttattcctgacccaactctctgatcggcctgggttctcttgtcggataactgcaaggtgttcgtcaacgtacggcaccacctcagtcatatgctgtagtaccgtgaaatgagctttatcgtacaccttccgatccaacctaatagtctttcttccaacagtaccaacaccgtcaagcctcccttcgtgatgagatcgtggtaatccaattgaagatgtttctgacatgtagtccacacaaaattcgatggcctcttcggtggtgtaactctcgatgatactcccctcggggtgtgaacggttccgtacataacccttaaggatccccaggtacctttcgcaaggatacatctgcgtcatgaatgctggaccacagcactttgtttgcctcacaaggtgcaccggaagatgttccattatgtcaaagaaagttggaggaaagtacatctcaagatgacatagggttctcacaagttctgcctgtagttcatctagtccctcgggatcaatgatcttctggccgattgcatggaagaaggaacacaaccgctggatcgtgtgtcacaccttaggaggcaaaatattccttattgcaacgggcaacagctgtgtgataagaacgtggcaatcatgcgacttcattccaaccaacttaagatcttgcagtgaaacgagcctactgattcttgatgagtaaccagatggaacctttataccactcaaacatgttagcaaatcaatcttctcttctttcgagagagtgtagcaggctggaggaaggtaaaccctgccggattccgtggttatgggatgtagctccgaccgaacacccatatcttccagatctcgtcgggcgttgagaccatcctttgtagtacctgggttaagcagtaatcccattaaactctcgcatacattcttctcgacatgcatcaaatctatgcagtggcgaacttcaagatcctttcagtatggtagtctccagaatattgacttctttttccacatgctcctctcttttgtcttttgtttttccacatgctcctctgttttttccttcgatgtgctcttctcttttcgctttccaactttcctcttttttccaaactcgttggttattcccatcactaagttgtgcacctctgtccctgttagctctgtcgggggtccggctgtatctctgtgtccattgaaattcgttctcatattcctatacgggtgataccttgggagaaatctcctgtgacccatgtagaccgtcttgtgtgaatgcttcaaccatttgcttcttgtttcctccatacactccgaacacgcccatttccctttcacagtttggccagaaaggttgccaagggccggataatcgttgatggtacaaaacagcatcgcatggaggttgaaatactcttgtgcatatgcgtcccatgttcgtgtgccctcattccatagcctttcgaagtcatcgattatcggttcaaggaacacatcgatatcgttgccaggttgtctcggtccttgaatgagcatggcaagcataatgtactttcttttgaaacacaaccagggaggaaggttatagttaacaagcagaactggccatgtactgtgacgactgctcaaatcaccaaaaggattaatgccgtccgtacacattgcgaaacgcatgtttcttgggtcatttgagaattcctggtaaatcctatcgattgtcctccactgcactgaatctgctgggtgcctcagcatagtatcgactttccgttcttcggcatgccagcgcacaagcttagcttgttccttgttcgcaaacattctcttcatgcgctccgcaattgggagataccacaccacctttgctgggcctcccctctttgacttacttccttcaccttcactctttgctcgtttgtatcttgatcccccacaaatagggcagacatccaagtcagcgtattccttgtaatacaaaatgcagtcgttcggacatgcatgaattcttctgacctccaggcccaacggacataatacttgcttcgcttcatatgtcgtctgaggtaaattgttcccctctggcaacagatcctttaacagctcaaggagttctgtaaaactcttgtccgaccagccattactagccttaagcttcatcagttccaacacgcatgacaacttgctgtgcttcgacttgcatccatcatacaacggcatctggcaatcttccaccaacttactaaacttctcataatctctgtcgttgtcctctgcgtcttcaatgtcatgcaacattgtagatagacattgagtgtccaaatctatggtctctccacctaaaggagaaggtacgaacatgccttctcgagctgcggcggtgttctctacatcctgatccaacacttcttcagctgcgtcatcaggcgcctcttgctctccatgcttggtccagcaggtatatttcttcatgaatccattcattatcaaatgagcatgcacttcatccttgtcttcgatcatctgttcattcttacagtccctacatgggcacaacatgtgcatgctcatcctactttttctgtcattatccgcaaatgtgacaaattcagtgaccccctctctatactcggtagacgaacgatgcgcatagtacatccatctacgatccatctgaaatcaacaacatacgaagaaaaataaatgatgatcgatatgttgagaatgaatggagaataatgtgttttttaccttgaattttagcaaaaaatcgccccccttgccctcccaaccgatttgtgaacagtacaatggtcgggatggaaagcagttggcagtttgggggtatttatagacccaacacacctcaaacgggttagataaaaaaagcccgtcaaaggtattgctcatacctttgacgggcttctattcaacggcccgtcactggtatccgctcacctgtgacgggccagaaatgaaagctgtcacaggtggcggcccatcacctctgacggcttctaatgtatcggcccgtcacaggtgaggggataccagtgacgggttggaagaaaaactcgtcactggtatacctctgacgggttttcctttcggcccgtcacaggtgaggggatacctgtgacgggccacggccagatgcctcaccggtgacggcatcccgtataacccgtcaaaggtaatggtcactactgaccaattcgtttgcccgtcacaggtatcccgtcagaggtgtgaggatctggcgtagtgacaggatttgatgacaaatacttagctcccaaattatcacaccaaagacaagcagtagttgggtgactaatttttaactcatcaagcactttttgtacccacattacctttgctgtagcattagccaaagacttatactctgcttctgtactagaccgagagaccgtggcttgcttgcgtgcactccatgaaataagattctttccaagaaacacagcaaaacctcctgttgatcttctgtcatctagacatcctgcccaatctgtatcggagaaagcactgacaagcatagatgaattcttacttatcttaagaccaacatttcttgtaccatgtacataccgaagaattcttttaactgctgaccaatgagtagtagtagtaggagcatgtaaaaactgacaaaccttgttaacagagaaagaaatatctggacgagtcaaggtgagatactgtagtgctccaactacattccgataccgagtggagtccaatggccctagctgttctccactagtaatagacagcttttctaacactgataaaggagatgtgactgacttacagttggtcatccctacacgctgaagtaaattagttgcatatctttcttgtctcattgtgagaccatcatctgttctctgtacttcaatgccaagaaagtagtgcaagtctccaagatcttttaaggcaaaatctgcttcaagaccctttaataaagcatctgtagcactttgtgaagaactggcaactataatatcatccacatatactaaaacaaacatggttaaatgtcctttgttaaggaaaaagagagaagcgtcagctttagagggaataaaaccaagctactgcaatttctgactcaagcgtgaataccatgctgtcggtgacatgggaccgggggtatcttgactagaggtttggggtagctgcagtcacccacgtggcctaaccccctcgggggggtcgggcccgagggtgatgtggccgcccctccttctgtctccccgaggggtcgggccgctcccgtttcggccccgagggctggggcgccccgaccccctgtgggtttggcgccacgtgtgtgggttaggtgagcacagcggcgctcacctaaccgcgtttattgcgggttggacgagcgccccacgccgcatttaatgcagcgcagcacactcgttcggtccgtgacaggtcacagtgtgtgaccggtcacagaccggtcagatcgcgggttaggtggcaacaggcggcctttcgcacgcctcgccccgtcccgtcggaatgatgagagcctctaggcactcgtccctagccggagccggcgtgctgactcctggagttagcacgtcagtcccggctagattcataccaggcttcatcgcaaccattacaaggaagtcattttatgaagaagggctgacgtgtggcatgctaaactgacgcgtggtagacaagaatgaccggtttgtgactggtctgacgccggtcacgtcatcggcagacaaccgtggtcccatgttgcgcctgcttccggcggagtggaggtaggtatggcccatcccatcagagggtcattcggacaacagccatggcaaatctctgcccattaatgagggagtaacagggagatccccggtgtcaggcgagtgatgacgctgggcctcactcaaagacaagctgtgatttagcttccaggcgaaggcgcaagccagttttttcttttttgggaagatagggtgagtccccacccaaaagaagagtaggtagaagtggtgcatgtgggatccccttgagatataaaaggaggaccttgcccacttaagaaggggggagctggggaaagaggggggagaagacctgagctcgtagaggagagaaagaggaagagggtttctagagtttgaactctcttgctctccagctctttgtaactccttcatacacagatccaccagaacacaggagtagggtattacgcttctcagcggcccgaacctatctacatcgcccatgtcttgcgcatttgctctctcgcgaaacattccacagatcgagtgcttagaacctcacctagcgcccccggccgaaccggcaaaggggggcccgcgcggtctcccggtgaggagccccacgctccgtcacatgctctaggcacttgtttgagaccatataaagctttatcaagtttgcaaagataatgtggatgatatttatcttcatacccaggaggttgccgcatgtatacctcttcctccagaactccataaaggaatgcgttctgtacgtccagctggcgtaagctccatcctcttgtaactgcaactgacaacacaagacgaatagtggcagctttgactacaggactgaaggtgtcctcatagtcaatttcatatctctgtttaaaacctttagcaacaagacgagccttgtatctatctatagttccatcagccttctgtttaattttatagacccacttacaatctattatattcttcccttttgtaggagggactaaatgccatgttttgtttttctgcaatgctagaaattcattgtccatggctagcttccaatttttactattcaaagcatcattcaaagtatcaggttctgactcagcagtaattaaatttgcccaacgaactgtaccgtctgtgtaaaccttgggtttacgaattccctgttgtagacgagtggctggtcgttgaggctgagtcagggcagcttcgctggatgtggtagagttgttcgccgtagagttggtcgccatggacgatcttgacgacgagctgtccgagagaggctccgacgagcccccgtcgatcggaacagccaaggagtcatcgccgcgtggaggagacgccggctcgggcgcactgtcggagacacgcgacgaggaatggctggtggatggcgatcggctgagagaagagccggctgcagcgcctatatccccaggatgatgcgccgcagttgcgtcagaagtcgcagcgtcgtcaggggctgcgtgagtgttaggagccgcggagtgcccgggccgcccgccgagcagaaaaccatgggtgttttgctccaaaatttgccctgttcgcccagaaatttcagcagcagcatctgcactcgtagcaacatcaactggagactcatgagcagggttagtagaagaattaatcacatattggtcaacatgttcgtcccgagaaggattcaaaagatgttctgggaggagaagaatttcagcccggagacaatgaccagcatttggatgaaggtcagaaaatgggtagatatgttcatcaaaaaccacatcacgagaaatataaacccgaccacttaaaccctttgtgcattacactgtaaccaaggaaaacacaccgtttcaagcggaattggagtttgtgagaattgtaagggcgtaaatttggccagcacgcgcagccaaaggtgcggagggaggtgtaatcaggtttgatatgaaagagcatttctagaggtgtggagccttggagaacaggagtgggaagccgattaataaggtaagtacctgtaaggaatgcctcatcccaaaacttgagaggcatctgagcataggctagaagggatagcccaacttcaacaatatgatggtgcttacgttcggcagacccgttttgttgatgtgcatatggacatgacacacggtgagaaataccgatgcgttgaaaaaaggaattgagtttgtgatattcaccacccaatcagtttgcatagctaatatcttgcgatcaaagagtcgttctacaggattctgaaaattatggaaacattgaaacacatcggatttatgtttaaggagatatatccaagaaaatttgctgaaatcatccacaaaactcacataataattattcttcccaaccgaggttggtgcaggaccccaaacatctgaatgaataagctctaaaggagcactagaacgactcaaagacttagaataaggaagttgatgactcttccctttctgacaagcatcacaaaccgaatgcttgtttgactcactaacacaaggtaaattattatgactcaagacttgttgaacaatgactgaggacgggtggcctaggcgacaatgccactgcgaaggagaaagcttgatagctgcaaaaacttgtttatttgggaatgatttcagaggataaaggcctcgctcacatctgccttggtgaagtagtttcctcgttacctgatccttgatagaaaaataacgagggaaaagctctaagaaagcttggttatcaaatgcaaggcgatgagcagagattaaacttttgtttgcttcgggaacataaagaatattttttagtataagatcacggtgttgggtgcgaacaatagattgaccaatttgattaatcttcatacctgaaccactggcagtatgaacttgatcacctccattgtacttctcccgcaccgtcagcttgtcaagatcgctggtgatgtggtccgtcgccccggtgtcaatataccaattggtaccaacaccgtaggaggaggtagcagcagcagcactcttctcttcgccagtgaaggaagcatcaaacctcttgtagcacttgaccaccgtatggcccaatttgtcacacagctgacacttggggtgatctcctccttggttgttggtgaagccaccacggccgcggccttggccgccgcgaccacggttcagattttggccctggtttggctgaccatggccgcgacctcctccattgccgccgcgagaagcagagttggtggacgactgaatgccaccctgtcgaagttccaatcgctgctcaaaagtaacaagctgtgaaaacaactcaccgactgagattggctcagaacgttgggcgactgcagagacaaccgggtcaaaatcatcatcgagcccagccaggatgtcggagacgatgtcgtcgtcgtcgagcttctttcctgccgaggccatgtcatcagcaagaccccgcatcttggccacgtactcggcaaccttcagattgcccttcttcgtggccgtcagagccatgcgtgtgttcatcacacgcgcacgggagtgagatgcaaacatcccacttatggcatcccaaaccccaacagcagtgggaattgagaccacctggatgaggacatcacgtgagagggagagcaacaggtagctgagaacctgctgctcttgcgccacccactcggtatgcgcgggattggtgacccgcacatccttgtcgtccttcttggtgatgatggtggccggcggctcctcctttgtgccgtcgatgtatccagccatctgagctcccctgagcgcagcaagaacttgcgcctttcagagaggatagttgctgcgggagagtttctctgtgaccgcgtgcgcgagagaaggagcagcgccaccggctagcgaggatgaagacgacgctataatcacgacgtcgaggaagcaggctctgataccatgaaaagattggatttaacgtggatacctctctcggtcctccacggttgcgtgttaaatatgcacaggaacagcccctggcgtggcacgattacagcggagagattacaacaaatcttatcaagattaagagataaacacaggagactaacaaccatgatctatccctcaaagttaggaagctaatcctatcactaactgtgactagatagaacaaaccttaacaactactatacttatacgcataaatatctataggtatgaattgagtgctatctttatcttaaactagtactttatcataaaatatactccctcgttccctaaatgtttgacgtcgttgactttttaaaacatgtttgaccgttcgtcttattcaaaaactttttgtggaatgtgaaaaactatatgcatacataaaaatatatttaacaataaatcaaatgataggaaaagaattaataattacttaatttttttaataaaacgaaggtcaaacatttttttaaaaaaatcaacggcgtcaaacattttgggatgaatggagtagtaacttttaaatataaatataaatatgcccttatctagatttatagttaaaagttattatattaatttgaagataaatggagtaattattttcgcacaacgtgtacatcgcttgatctgtgttcagtgccgtcgatggccatgtgccaagtgatcgaccgcacaggggcccccaaaatcaagggccccaaaattctcatatttaaatacaagacactaatttccaatatgtttttatcctattcattttatttttttttaaaagttcccctcatcttgacgtactgatttggctagaacatatttattttctttgcattcaatagatgttcaataataattatggcaaactcaaagaaatatagtttatagcggcgccatgaacgtgcattctagatactaaacattcaatttttacgattagtaaagaaaatcgaataactacattaagaagcacttatttttcttacttaaggaggtgtaagccaccatttacgtaatattttttctgaacaatttagtatcccttttgttgatattttctaaatataaggtctcattttaagtttcacactggggcctaaaattgctaggtacggccctgtctgtgttaatgtttttgggggcatatgggaccacgtcaagagtgcccaatgtgtcgaggaaaaaaatgtccaatctacgatactactcaaaactaacacattcctcttgaaaacacacgctaaaaaagtttgagatcagcgacaaatttctacctcactaaattcatattcaagtcatacataaatgactccatataccgtaccaaaaacatcttctggaaaaaaaaatatctgcactactacataacatcataaaaggactagggctgtgtttagttcgtgtgccatttttttaaaatatacggacacacatttaaagtattaaacgtagactaataacaaaacaaattacagattccgcctgtaaactgcgagacaaatttattaagcctaattaatccgtcattagcaaatatttactgtagcaccacattgtcaaatcatggtataattaggctcaaaagattcgtctcgcgatttacatgcaatctgtgcaattggtttattttttcacatttaatgcttcatgcatgtgtccaaacatttgatgtgatcgaaaaagttgaaagtttgaagaaaaaaattgaatctaaagacgacctagcactatatataccgaaaatgttaaaactgttaaaactgacatatataaacctttttcctatctacatgggttaaaaataatatacaactagttcctttgaacaactatagatgccggttctaagaaaaaccgacaccaattttataggtgccgccttcaatatattatagatgttagttaattaaaaaaaggcattgtaagaatcgagccaaaaatgggagatatttttttagcaaagtcaacatagatcatccttatcccttcgctcgttccacccctttctctctcgcccacgccatcccttcactctcgccctgccataccctttatctctttgctctcgccctgccgctttctcctcccatcctcctcagcatgtggcagcatcccccttccccttccccaggttgttgttttctcctcaatccaaggcaatgatgggggctcgagcaaagatgacggcggcaatggtttggttggtgtgataacgactcccactccccctcgccctctttgtttctcgggcgtcgatgcatcgatggcgtcacctccaactcaggggtcgttggatgtgccccccccctccaacagcgatggtgatggcggtccgactacggcgagcagtggccctccctttgaccctgcctccctgtgagcaatgactagcaggtaggtatccctcctctccttccccatccatccctcccaaaaaaaaaatcccctcactatgtattctggatttgacagtggtggtgagcggtaatgccttggcctccaataaacagcggcggtggcggcagtggtttttgtgagaatttgttatttggtttcttcttattggatctgtgagaatttttattcagcttttgtccctgttgttcttggcctgaagcattgagtacccgaagcatcaactcgatttgagccgatgcgagcctcttttttttttattcctataaccatcaaaggtactgattcttaaacccgtacctttaattgttcacatcggtattgtctagaggatgcgggtaggaaatccggtgcttatggactgttcccaaccggtaccaataagatttttttaaagcagtgctgggaaccatattggtccaggtttgtctgcatcagttatgcatgggggcgaacaaaggcgttgatatttcgtaacatcttaacagatgactgttttcattttggcgaaaaaaatggttcgtccaacccggccgaaagcgcaaaacactatcttgatctttgacagcatattttgctgcagaaaccccagaaatcacgtacggcagcccagtgcaagagttaagatattgtcaggagactcaggatgctcagcacgaacacaggagactgccggtagtgcggccaactatatcagcgcgctgccgctgcctgtctatatcagctcatcagactccatcactccacagcaggagccagccagccaagccggggtacctggagctgcatgggcccatggcatgcatgcagctttcgcaccgagagcgcggcacagcgatatcacgagccggcccggcgcgctttccccctgtacagtacaccgaggccctgcactgcgcgcgcgcctggcctgctataccgatcgacggcccgacgggccccggcgacgccgcgccccccgctgcggcccttccctgtatgcatggcatctgcgcgcggatcgcgctatacctccatcgatcacccaaccaacccggcatgcatatggcagcgtaagcgttcgtgaaaaggcggtggcgcgcgcggtcctcgtggcacgacgcgaagacagcaagcggcgcgtgcgtacgagcgtgcgcggcgttttgtgctggcgtgaggtgtgtcggagcggtatgcatggccgggccccgatgatcgatcggtcggtcgatcgacctgcggtgcggggtgcgggagccggccgggcttgtactgtagtagcgtagtgccgtggctgtgcatgcgctgcaccgctgcagggtgagacagacagaccgggttcgatcgaggtggtcacatacatatatatgtagccagggtggccacaggctacactacgcgtgcatgtgacgggccagcatatatagcactgtgatattgcgagtatatatatgattaaaacacgtacgtctgttattgacttattgtacagtagtttttttagatacagtagtgtgcagtagctaaggtaggtactatacgtacgaatacgatgttgctcccctttaccttcggttccttggagtagtatacataggaaatgagatattttttccccaaacaaacaagaaagaagaattgaaggtcttcaagtaaagggcagataggaattgaagaaaagtctactccaaataaccaatccttggagtagtactccgtactgatgaatgaacggtaagaagtttgatcatctctgaagaaacgcaaattccaccagatgtgtgcaagctgattgcgctgactgctgaccgatggtacgcttggctgcctctgccacatccgaagtttcatcgacttctgaggttgagtgtgacttcacggtccaagatagtactccgatcgagtagattgcctatgtcacatcttatgatatcgactgctagccagtacttgttgataaacaaaatttgaacacgtctgcctttttttcccagcttccggagtttcagagaatactctcagttatccgataacacacagttgctgctacagtattgtttaccgcaagagcgctgagcgttacatgtatacactgataatactattacaaaggagtacacagtcacacgaacagaatacaaagtgtgctgttgctttacagggattgtcaaggagaccacgattgcttgtgagagttgacacgagctggacgggatctctctgagagcagagtgacattcattcgggcgtgaccacgaggagcctttcgtctggtaggcctttgcgtgcatggcttcctctccaagctctcacaggaaaaaggggacgagtactcagtgctgcaggttcttattccctcccagattcttcgtcacgtataccaatcttcagaaagaacacgtacccggggaataactctggccggcatgcgtgtagagacgagcacggcatcgtcgtcatctcactaaccgagagacagtgaggttcgcgtccatgcaaaatatacttcattcgtgtgaaaaatatagtaatctaaaatggaacacattctaggataataaagttagatatatctttgttcaagtttaccattttacattctatcttaagttcttatatattggaatagagggagtaagtatttttttaagttttaacaaaaaataaaatcaagaaaagaaattaattgttatgaatgttactatgaaaattagataaagaaaaccggttgtgatcggttaaaaataaaaaagaaattttaaaaataccatcagcaaggtagatgaagatataaattgttatatttttagtcgaacggagtactcatctttttttccttttttttaagtcgccgtctcccccgtcacctcgtgaagatagcaggcacgcttactagcacgtgggccgagcgaaatgtattggagacgtctttgttttcctagccataaactctctccatccctaaatacttgacactgttaaccttttaacacatgtttgatcgtttgtcttattcaaaaattttaagtgattattaattctttttctatcatttgattcattgttaaatatacttttatgtatatatagttttacatatttcacaaaagtttttaaataatacgaacggtcaaacatgtttataaaaatcaatggcgttaaatatttagggacggagggagtataatgcatatatatgttcgagaaaaaacatacagttccaatacgtacatatatgcctctttctcacgtgggttccggatgttcatctctctatctagccgtagttttcacccaactcttcacttgttgcttgaaacatagtcctaactaatccaatgcactcaatctggttggaaatgcttccttgaacatattgtcatttcaataattacctcgaaaatcactggataggatttctcattaaaaaaaccattttcgtacatatctcctatttatttttacatgcggtccaaaaaatttacagtgtgtgaaaatgcataggagtctccttatcaagacccgcgtgtaaaaattttgacaggacaccccaaagtgatacggctagtggacaaaaaaaaaagagtaattagctataagatactacggcaattattttattatcttcactccaaatgaagagagaaacatataaagaaatacattttagccgtcatggacgtcgtcgcctcctcctccaaattctatagggttttggagggggatcaggagagggagagtggattagttcaatcaggttacaagcaatctggccctagaggaaaaatagtctttttcacacggtttctctctccatttggaccaaaattaataaaataatgatcacaatatctcatagttgattaccatttttaggattccgatagctatgtcatgtttttggagtgtccttcagcaatgagcataaaaacaacttttctaattaattttcacaaacaatatatagttttaggaggaccgcatataaaaaggatatatttacaggagtcaccctaggagcaccacatgtataaaagcaaataatctattaaaatcgaaggagggtgggccacttctagccgcaagccccttcgcatctctctccgctcctcactctcctctcccgcaccaaactcgatctcctctcctcctaggcgccaccctcgtcatctcttcctttacacacatcccacgttgatgtcgccgcataggcttaacaaggagttcaaagccataagatctgattcaccttggcctttccactggtggcgcgcccaaatcaattttcgtagacggcggtggatcgagccatatgtgaaaatcaactatttttataggtttttaagttataggcgaaccctccaacagcatgtatatatgaaaaaaaaaatctattctagccgtatgtacaaactggttttgtagtagtgattcatgttgaaatgcttattactgagaaaagttagcacatgttgatgggtcaagcagttatatgacttaaaggatgatttcgacgcaatgcagaacacttgaagaatgggcctcggtgaagggcaagagagacaaattttttactatgctcatgcatgtacgaactagtagaacagaacagcatactcagaacatggataatctgcgcaggaaaccataattaatgccatctacagtacgcaggtgcgcgattaagttaaacgcgattgtatgtccgcatcaacgaaaacaaccgcaatgaggccaaagcagggagaatctcagcgtataggctggggccccagccccccaactcagcagatgaggcatgcagccatattcctctgcctggctctcactctcactcgatcacctcccggtaaaatccaaacggcgcggcataattctgccgcataaaaccaagcgaccaaattcccctcctctcaccgtgtcacacgggaacagaacttactactcggcctctgcagctatatagctctcgatcgattctgttctaagctctagtaatctagcctattgcatgccgttcccaaggttagcgaatgtttttagactaagccgtgatctatcatctgatagtatcaggctatcagccatgaattaatatatatatataaatactactatatggatgcatatatatgtctgatgtgacctatagctttgacgcaatttcctcacctaatgcttgtgatatctatgggttgttgtcacgacactcgttataggttagtgatatctaaaactaattttgattacgtttctggagtttactttttgtttatagttaggacatcgaagggtcctgtttaaaaaggtcctccttgacgtacggattagagtatgggtcattgtttgagtatatgcaataatacgtacacaccatttttcccggttgatatatagacgggcagcattacaatactaataatcacactgtaactgccggcctaacaacgtcattggtcgcgtgcgatttgacgcctgcttggcaaatcgatcgatcaggctagcatgccgctagctggggacatgcgtgaaaagattgtaaaatcaccaaaaccagagaaagcacgtttaattattaatgtctgatcttgattcttgtctggatcgatcttcagaaaacatatatatgtgtatatatatatacaactgtcagttagaacatatgatccgtgaatttctcacatggttggcctgttgctacctgtggtcattgaggctacatcaactacttctatttccttgtaatgaaaaaggtgaaatacgcacgtagtttagactcatccgttgcctgctgctgtttattgtagtataatcaagcgatattttgtgattatatggaagaaatatacacacattattacttaaatctcctattgaaagcgtgttcacgtgtaagtaatatttatacgcaccaagatttgaaataatcatacaatcatagtcatatgactttatcgagacgaccggtgcttccctagaatcaagagatataattcgatcccaggaactgtcactactataaaaacgattttcttatacacagagctctttagattttagatggaccgtaactggtcgtgtctgcaacaatcgtcctccattttcgggtgtggatccttaagaggaccacacgggaaaatcgattttcacaaacgggtctcttaagtggaccgcacgcaaaaatacagatttttttatcccatcccctctccctcttttccctctcgctcatttcaaatttttcacctcctctctattcctttcccttttattcactccctcctctctctctctctctctctgcctcacctctcctctcctctcatcccctccgagcgtgcggcacgtgggatgcgggaggcggctggctcggcgccgccgtggccgaggcggccagcaggaggcggcgcggtggctggcgaccggcggttgggcgtcgtggccgggaacaggcggctagcggctcgggagtgacggtgctatctgccgcgcgcgcgcgtgatggccagatctgcgtcgccgcctccaccgagtaagaggtggccgggagcagcgccgccctccccacgcaaggtggcagcggatctggtggtggggtatgcaggcggcggcggatctggcggtggtaaggcgtagcggcagcagatccggctcaggtgacggcgacgggagcgggcagaccaggcgacggcgacgatgaggatggtggcaatggcttctctagggttagggtttcggatatttggattttctttttcggttttttatttttgcgtgcgggcaacataagcacccaccttcagggctatggcggccggggggggcttcctctcaatccaagcacaagactgatggatgcagatccgccttcgccatggtctctctaggcgccgaaaggggatcagattagggcttggcaaccagataagattagttggtgatcaaggagcttggcaaccagataagattggttagcgatctaggattttggccaggctcacatcgacctgctggtgttgtggttaccaccagcatgtgcacaaatttcagcgtttcgacgacagtgcccccatcaacatgggcaataccatggatcgtggtacctactcatgctacgcaatccaaccatccataccatcgtccaatggggatgactgcacatggatgaatgatgttgaacaattctcgcctgccaatggcaaatgatcgacggaaccttcgggtccaagaaaggaaccaccccactctcctcaacttggtagttgttcctttcatgtctagtgcaaccctcattctctaatcgtggggacagccgcctgctaggctactagcgatcaactggagatagctacaagagtagtggctttttgcaggattgggaaaattggtcatgggcaactaaggccgattcggcagtcttggccggtcatgagcatgtcatatccgactgttctcggtgaccactgttgttggaggcatatgtttgttttggtgagctatttggtaatcgaacggggccatgaggtccagtgagataactgcgggtgaaaatcctaatcctatttctagatttggcaatgttgttgattgtatgttgtctcctagttgaaggtgtcgtcttagacttggataaaaatctagttccggttaaagatgatagcggcagacatgcgacagtttcttcttgaaggctttgttttgaagtaggtttatataggtctttgtatttattcggtgactgagaattttttttcctctattctggctatgtgcatcctagtatgatggaagaagatgccatgtgtaatttcatttattaatatttttcttcccattataagaaaagtatcgtcatcctcctccctcactatctagctccccatataaaaaaacaccttatgaaaaacctccccaccaaaaaaccagtattttcacgcgaaaatcaactcgacaagccgcatagaaaaaaaactaaatccattaattccaatcccgtataatgcatgagcatgacaccgggtttggctcggttttatgtggacaatgggcagaatagctatattaaggctattaggttagctagtttggttggaccggcactactaccaaactccacatccataaaaccctcataagtatcggttcacttcaaaccaacacttttgaggaattttccggcgcaaacgagcatttttaactggatcaaattaaaaaccggcacctataatcactcattggtgccgattcataataaaaacccgtaccaatagtcataggtaccagttattataaaaaattggtacctatatataaaacaatagtaccggttttataaaactagcacctatatgtgagagataggtgccggtttttataaaaccgacagctatgaattgagccgagtcgaatgcactgacaaaaatatctcaagtagtaggtggtcggttttctaagtgtggtcgacctcttatctcccacattctcttctcttctggatccatctaggcggcgcgggggggcactgccaggcaacgagcgggggtagtggccggcaggtggcacccctccatcgaggggcgggtggccggtcggggcggtctctgccgcgtcgaggggcggttggtcccggtcgacgggcatcccactacagcttgatgggatcaggagctcgcgcgtgttgtcgctcccggtcgcgctctgcctccctcccgcccccctctcggggccttccaggtacggccgccatgagctcggcacagtatggtggcgagcggcgtcagtggtggcgttgttctcttccttgaagatcttttttcctcgatgttaatctatgcatgttagattctgtaattttgtgctttgatgttcttgaatatctctcaatatcggggtctctatatatgttgttgttattgagtggtggattggtggtgtgtggatgttgatgaatatgttcttggatgggatgttgttgggatgatagggagttgcgcgatgcatcagctcaaatcgaaccgacgcatccatcgagccatttttttttattcgtgagaccttgtttgcgtgatgtgtcgttcctaaacaggcacctatcatttctcctcataagtgccaccttggggatgccggttgagaaaccgacatcaatatgggttttccaattggcacctataggatgttctctagctagtagtgtgggttctagcattttatgcatgatgtgatctatgtaactacatgcaacgaatcaaactccaactaattaagaaaatgtgttagacatcatcgcaaattaaatccacacccatgcatgattcgtgaatatatatatatatatatatatatatatatatatatatatatatatatatatatatatggaaagattagtccgaaattaatcgttgtttttttccctgcaaagaaaataatcacgcgctgaacattaagcgtggatgtaaataatcgctgagtaatttgtaaagagatcttttagttgtcatataaacaaacaaaaaaataaaatggtttcttcgctgtgtacactactagaaaaatcatttttcccgacgtggaggtctcattttcgcaggcggatatgacccttagagccaaatgaccgcctacgaaaatataaatcggggtgaaatttgatgtccacttaagcggcgcctgcgaaaatcattttcgcagggggagcacttaaggggcgactgcaaaaatcattttcgcaggcaccgcttaagtggtccgcctgcgaaaatagacttaatataaatacacgcgggcggcaattttttctaagtcctcagtcctcccctccacacctctcctcaccactggcccctcccctcccctctcctcctctcccctcccctcacttctactctccctggcggcggctcccggcggcggcggcggtcggtggcggcgaaggggcgactgcgaaaatcattttcgcaagcgccgcttaagtggtccgcctgcgaaaatagacttaatataaatacacgcgggcggcaattttttctaagtcctcagtcctcccctccacacctctcctcaccaccggcccctcccctcccctctcctcctctcccctcccctcacttctactctccccggcggcggctcccggcggcggcggcggtcggtggcggcgaagggcggcagcggcgaggaggcgaggcggcgcggccgaggtggccggcggcggcgccgacggcgtggagcggcgacggcgtgggctaggtagcggcggcggctcccctcccccctccctcccaaatctggccggaggagggaggggggaggcaggcggcggcgacgatggcgcgggccgggcggcggcggcggcggctcccctcccccgctccctcccagatctgaccggaggagggagggaggaggccggcggcggcgccgacggcgtggagcggcgacggcgcaggctaggcggcggcggcggctcccctgcccccctccctcccagatctggccggaggagggaggggggaggccggtggcggcgccgacagcgtggagcggcggcggcggctcccggtgcgggctggcgtttttttttttcgtttcttctattttcgcaggcgggccgttgccccgactgcaaagatgaatgattttcgcagtcgttatggtgcaggcggacctctctcccgcctgcgaaaattagctttgtctacttgcaaaaatgatttttcagtgatgtccgcaaccatcatgcctcaccgatcgagaggaatgatcgcacgtgaaccgccagtactcgtgttcagttcacgcacacacgaaatatctacgagagaaccgcgtcaaagtaagaaggcccccaaggcaataattgactatggaaaacaacatcactagattatttcctgtataacaatgccatgtactaattctataatgctcttgaaattaaggtcaccgttaaattggattaatatatgcacacgtacgtggcccttgatccggattacagccggccggcccatgtctaattgtccatcattgccgacgatatatactactcccgtaaaacgacacaaggttttttttcaaagggttgagttgaatcgaaggccgtgatgcgtgacgccatacgcgacgacggcggcgcggcaggcgtagatagctagcgagcaagcaggaagaatccatggttacgtgcggtacgcgtgccattaatttgacggttgagaactccatccggtctcctgtttgatcgatcgtcggtcgagcatttattatttcttgtaccaatctgcgcacgtacgtacgtaggctgaggcatgcatctatatatggctcgtgcgcatatatacagcacctacaaaggtgacaatcgtacgtgcgtatgtgcgggtggaccttagtcaaacagtgaactcagcatatatatatgcacaagaatttttcccttgcttgatttgtttatacgtacaagctagtgtgtacacgccgcaacacatgcacaattgcacaaacacaaataaagaaataacatacgttggcatatagtataagtcaagttttgatataagctattagtaaatatttatgcttgaaacatttttttctactattatctcgcagtagcactaacagagccaagagcactaaaaaataaggcaacaagtagattctactgaataatgattatgttcaaggtaaattatttcagcggtggaccatgatatatgctacctaagtatttagttcgatcgggtggcctcccacctacctatgaggtgtgcctctactattgtgtttgttatcttttgtggagatagaaaaacatatatatggattgtcgacctagttgtgttggtcgtataggaactatttatattgcgttgagaagtgttcttaattttagtagtcttcctcacctacctgacattaagtacaacctccaaaatctttttatatttgtacacaacataatctctttacatttttttcccaacgtgcactccgtctgccttgctaatgttgggccaccagttgacgcctttgaaacatcaccttcctcactttcacttccatctacctcaaacccctccatgcaatctgcctctccggcccgttcccctctatgcttgatcatctttgtcgatcgagcctttcgtcacattgcaccttcctaatctccatcattttttaggaaataagcgtcatcattcacatcctcgcaccatttaactttcctacctacgtcacgaaacatatatacatcctcttcttttatgctgccaagatggtgacaaacaaagcctcttgtatctaaagcccgtccttcctcccttttacacatctagaacactaatttaatgttgtgctaccacttcgtagctatttgcaataagggatcttttaaagcattggcggaaccaaaactttctagagcccggacaaatctaactgtgccaaagatttattgtgaacttactattatctctctccataaccgcgattaaacttggcggtttaaccgcaaaaaaaatcaggtggccgccaagaaaatttcggattcttgtagtgtttgccaagcggtgaactcaccactgttgtgaggagcgctcatcagagaagccacaccattgtcactggtaagcatatccttcccctccaatggttagagggatgaagaagcatggtaatttttccctatttttaatataatttatttaccgtatggatttctcctacaatgttttccttaagaaaaaaacgaagcatagtaagtaagccgtttgattgggatcgaacagccatcatcaatctgcttatattttctcatcaacagctaattaaaaaaacatgagaaacataatgccttctcgccacctcctagccaggggcggatccagcataggggcagcggggtctcgagccctcactacttgcatgaagattatgagagcccccacgaagataccactaaatttttttaccatatatagttagaaggagggctataactctatctagtttattcagatcccactgctatttatttctgtatcagtcactgctcctgcctccctgagtagcttaattagaaatgccctcgtacttatgcttgcaggctgtagcactgtaggtcacaatagcgaaaattttcttgtcccaatccaaaagtaagtcggcttatgtgaatggtatctcgtgtgctcacagtgcacacagcacatatacacatgcgccgctgatcggcgagggagagatggatgcggtaagcccccgcagtctgtggacccaatccacagccgcttgacgacaccggccgctctcgcctgcgtgagcatttctcccccatcaactctaccggagttatacactcctcttttctataattctactacgaccctcacttgtctcactctgtacatcagactgtacatttctgtacatgtgaaccctgatagatacgtatgcgtaggcatcggaaaaggggtaaataaattaaatcgacttgtcccctgaataaacctaaggtaaaaaggctgtttaaaaatatatagtagcagagaggagagagcatatagtagagtgtggaaagaaggaagcaaaagggggagagagaaaagtatgacaaggagatgaaagaaatcagacaacaaccttcttagcctcctcctctccactagcttcttctcccttgccatgagttccctagtagaccaggactagcaggcaagagcaagcagctggaagagtattagcagcatgcagctctagagacgacaggcacagaggaggggagaggtatggagaagaagctaagcaaagctcttgtttttgctttggttctttagtttatatacgtcttgggtttgggtgtttgcgagctttttttttcttcttttcctttgtttctgagtgtaactgtttgtttggatttccctgcgcactttgttcttttgttcatctcggacgagccctaaccctttggagtttttccccagcttcttgtcgattcctttgttgttgtttcagatcgattccaagcagatacttacataagtattgagaggtattctcatccctttctgtttctcctttctgctcttttcttttggttttatccccatcctccttttgctagagaactttctgacatcttctcatctttgtgtgcttgcatgatgtgtagtgtcaatcttggttgttcttgcttgagtttgttatcgccatgtctcactcggacactacagcttcttgcagtgacgggaaatcaagaaaagaaagctgctactagcccaagccaaagctctacaagaagggaaaagattcccttctgttcttgagtagctagcttcgctcgagggtaattaaatctgagagcggccatggcatccaactcatcagcggcagctgtggcggcgttgtttggaattagggatggcgaccatgaggaccagattaagccgctatttgcccagcagcagcaacaccaccaccaccagccacctatggcgccatccaacgccgcggcggcggcttctgcggcagggtcggcggccggtcaagcggccgtggcggcgccaccagcgaagaagaagagaaccttaccaggtaatccatgcaaagtttatccctttttttttgttcagtttcagactttcagtcatgcatgcatggatgccagcatagcattcttctatctccttgctgatcttgtctcgatttatcggttggagcgagtttcaattcctttgttttagcatgcacaagaagacagctagctactgctagcttgtccaagattcacatggtttttgtatcgattttaccgtgtttgtctagtgattttttttcttggttttgaaatttttgattcacatgcataatgtcttttttggaagggatttgtacgctagcatagagtccaagatttggttcccttggatttaaattacatgaaatggtcctatatcttcttcggtttctaatttctctctcttctctagcttggtccaatgaatttcttacgcacctggattgtagtcacccagcactacttcatttaaagcttgtagtctcacctggatgaatagtatagtcctcagttcaggtgaaggtacaaagcacaaaatgatttcttgttttttttttgtttttttttctcatatgtcattataaatcagacttatttttcagtagatagattggttcccctaattatttctttaccgcagtaaagttccttaattcaaatagacaatcaccatcatttaatcatcaattaatcttagagattttttgggcaagattccatgtacgtgagctgttctcctcttcacccttgctggcctcttcctttctcttaccaatcatgagagatgcagatacgggccatgacatatgcacgagcaatgtcaattcatttgttccctacatgcctcttgctgcaaaattaattctcttttgccccccccccctccttcataatctcgtgcaaatattctctttttgccttaatttgtccctggctactaaaatcaaaaggaaaaaaaatcactactccccattacaaatcatccttgcatgcctaaccgatcttcatcaccataaatctactccgattgggaaattctttcgtgttaagaaacatgcatgcgtttgtcatcatcagccacactgcaatttggttttgtcatcagtagtgcggcaagctgtactccttatttctctctcttctaatccccacataatgttaaaaccaccgtgcatctatatctatatatcgatctaaattaaccattcacatatatgcatctaatatttatgttgaactaacattttgatcaggtagtgcagcgcatgcatatgtatatactcctatcttctaattaatactactttgcactagtactaataagctgtacttgcatgcattgcatgcgcagacccggacgcggaggtgatagcgctgtcgccgaagacgctgctggcgacgaaccggttcgtgtgcgaggtgtgcaacaaggggttccagcgggagcagaacctgcagctgcaccggcgcgggcacaacctgccgtggaagctgaagcagaagaacccgctgcaggcgcagcgccgccgggtgtacctgtgcccggagccgacgtgcgtccaccacgacccctcccgcgccctcggcgacctcaccggcatcaagaagcacttctgccgcaagcacggcgagaagaagtggaagtgcgacaagtgctccaagcgctacgccgtccagtccgactggaaggcccactccaagatctgcggcacccgcgagtaccgctgcgactgcggcaccctcttctcccggtaagcccacactctacccatctctctactacgtatatatgtatggtgtttttcgcagcttgatttctccatctgcatgagacgttgcatgtgtgtgcgtgctagctagcgaagaatgtttagtagtgtgcgcacaaaaatggcagcatgcacgttcggccggggttagggttttgtctgggtggtatagtgtagtactttaactaatctgttcacgagggttaatggctagtgggaggagaagaattatcgatgtcgtacacacgtgtacgtaccgcgtggtctgcaggatgcatatgcatatgtatgggcgaagagcattagggctactgctcgcacgtgatcttgccattgtcttgctgatgcaaatgtttccaagcgttcttgtgctggcatgcatcgtcgtcaagcctggctgaaaaggcctcccgtctcttcctcatgctatatatattacaagtcacacaaataaacgcgatatgtttatatatgtgtgcgcgtgtgttatactgattcatggccccaattcgggatcgatatgcccggaacgtcgacagctagctagcacattcttaattcgttgggctgtctgtctattcatcagacaactgaattttgaaatatctaagcggtcagaattattccaagatccgtgcaataactatatatatatatatatatacatatgtaagagcatgaccaacagttctctaaatgttaataattaaatatacactgtaagacactctcctacagttttttccttaaaaaaagacaatgctcctaaataaaatccaaccataaaaagatgggtttttctatgaaaattaggatccaacaattcccatgtagagatgataaaaaaaatttagcatccccaactccgtttttatcgttctccacatctagggaatggcacacccaaaaaactgatcatgcgtgggatgagagctatcgagatagcggcatggaaggtgggcgagggagatcgcccatgaggagagaagggcccctttttattttaggaaattaagtttagactatctgttatagagatcaaggtatattttatatccttaaattcttattagagatttcaaataagatatttattagaggagaatattggacatttgttggggatgcaataaaccacttcgatgcccggaatcctgatccatctctcgcctccgctagctcttcgatcgatctccaccttattggaaggcgccagaaattccagctagttgtcctctccatatcaaatcctccatccacaccatagcgttattattggggtatatatagcttcatctatgatatacagctcatgcagctgaagttcggatgtcgctggtgccaagagggcttaccaatgaagtcactagtgatgttcttagtgagtcatcctgttgcctccctctcttcctcgcacctctctcggtcggctagaggtagaagatgcttgccacttgtcgaatcgtcggatcaagatcttcatagatcaattggccaagatttaagaaacaaaatcccagtggactagtaaatagaaaaattgtcgtccatatatataaaaatataattaaacaagcttatatgtgtggcactacacgtctgcactatatttttattttaatgaatcagcgagccgtcaattttattgaatatagaaggagtaaattgtacaaaagaaatgagctgtacacgtctgcattatacacccccatatgatcgtaattggctaatctgttttgagctgccatatagaagagtatggatatatatagtctttcgctgtgtatatccacccgtggattgagccgactttctatttatatctaaaaataatataatgcaaactataacttatatcatgcagaatatgatatgtgaatgtgtgtgagctggccggctagatagatgtgcggtgcagggcctttcgttggccttacgtgtcagaagagcctgtggttcacgcttcacacggcttagatttccctcggatacatgcatactccgatccaggcccttacatctgatctcacgagtcacatgggtgcaacttcgcttgctagcagcagtgtcacgcatactgcagactctctctctctctctctctctctctctctctctctctctctctctctctctctctccagaatagcagcaagtgttcacccctatctttcacaactcgagcattttcctctctggcttcatggcatgacctctgcatgcagagttcttagcatcaataattttgatgcaatgggggcctagccctatatatatgtgtaggcttttgtagttttgcatgtgttttttcatccatatatattcttgttggatcaccctttggttccttggaaaatgagctttttacaaagtcttctcatgtctccgggcgagttggcgtgtgcgtgtgctactgctctctaccatggcgatgtccaatatgtctactactagtactagctagtagtagaatttcttttcccagccctttctccttggaagcttcttgcaccatatatattaattaagaacctatatatatcggtgacgccatgctatatcaatctgcctactcttttcctcgttttcatccctgattgacatgagtttctgggatctcgagcttcaattgagtgtgatagaagtcaagtgatgaaacgaacaggttttagtcaaccccacacttgaaaacatgtagaatcactggtagatttagattttttttctaaaaaaaagatttataattttttaaagtacatgcaaacacaagtacgaacaattatatatcaatgttattgaacacttcaaatacaagacattataaaaatgtgattcattgacaaccctgggtggcctaggagctacccggggtcgctaggcatttatctgcaccttggtagaagttgtacatattttgagcctttaaaggtcattctaaaataagaaggtcattgccctccttttgcgtgtcgcttacataatcaataaaacattaataacgtatattgggttgtcatatagttaccctacaaatatgtatgttcaaacttaatttgaacaagtgggaaaaaatataactgcgggaaatacacacacacactactttaatttcatagttaattaggtttgttttttctttgatgtaaatgaatttggtcgtggatgtctgtacagtaatacatgcatgtgacggcataatctatatggccaaatcttgttagcttataactatttagatttcatacatgaaacgagggcgcgcacgacacacattcttgatttaatatagcttaaaatacttctcccaagattttttttttcggaatactaacagtaggagttgttacacgcaatagataaaattcacttacttgtagaagaaagaattaaagatatttcaacgatagtatatcacacagttctactgtttagacgaccattatttctcgtacccacctcaagtcatacgcacagtgtacacacattcatgcatccttgccaattactgtactagctagtactccagcttgtaactttttccgtacaaatatatggtcgtcctgtgtatggaacttggaatcttatcggttcaaggcaagaatggaacgtacgtactacgtctcctaaaagatgcaaatatataattcttgaatacacattgcatctaattattatagtgcttttttgcatggatttctgtactgttgtgcttaacatgcaattgattagagaaaaataatcattttctcgggagtggattttaaactctcgagaggatatcccctcgttatttgcatgcaattcaaatagttacgaaaaaaatctaaataaaatatgagaagatgtattaatatgtgatatatcgctccacaaacatgcaagttaaaattcaacttttacatgtcgtaacgaaaaaaaataaatttaaccatgaatatgcattaactagctataatttaattttttttcgttgtgagatatagaagtcgaatttgagcttcatgtttgtggagtgatatatcccatattaatatatcttttcatttttttaaaaaaaacaactagactatttgagtgacatgcaaacaattatgggacatccttctaagagtttagaataaaaatactattttctcaactctctttgagagtttgaggagagggggattgagaagattgggaagatacacaaaacgaggtgagctattagcgcatgattaattgagtattaactattttaaattttaaaaatggattaatatgattttttaaagcaactttcctataaaaaatttttacaaaaaatacaccgtctagtagtttgggaagcgtgcacgcggaatacgatgtccttttctcacccaatcccccagaactcatcacaaagaacgcagccttagttgttagtatcgatatgatcaatgccttctttccaatatatagtaaactagtcgatacaccgctttttgctgcggaatatgtcgatgaatgcatgttatatatcatagaaatggtaatgtatatgtttaaataatgtaaaaataatgtggagatattgatttgacattgtttgcatattgagttctaaaaatacaacaaaattgtataagtcttttgtttttttctagtcaacttatttaattttgaccaagtttatagaaaaatataatagtatttaaaaaataaacatattattagaatatatcaaatgttagatttaataaaattaatttgatattttagatgtcgctaaatttttctatacatttaaaagaaattgacgagggaaaaaaaatcaaataacttaccgtataaaatagagagagtactactacatttgcacggatgacacagcaaaaattttgcatctagctgtctagctgatgagcaccacttcacgtgatttctgtatcagtacccgatactgtagtgacatgcactgtccttcgagttatcttcacttttgcgtcgtacaatttcacgtgcaaacttgtgccgcacggacagtgatcagtttgatggtacatcgcatgtgtccgtcgtcgtccatgcaaatgcaggagggacagcttcatcacccaccgcgccttctgcgacgccctcgcccaggagagcgcgcggctgccacccgccgccgccggccacctctacggctccgccggcgccgccaacatggcgctcagcctctcccaggtcggctcccacctcgcctccaccctccaggaccacggccaccaccaccaccatcacggcgcctccccggacctcctccgcttcggcggcagcggcggtggcgccatggctgcacgcctcgagcacctcctgtcgtcgtccagcgcctccgcgttccggcccctgccgccgccgcagcagcagcctccggcgccgttcctcctcggcgcggcgccgcaggggttcggcgacggcggcgacggcagtggtccgcacggattcttgcagggtaagccgttccatggcctcatgcagctccctgacctccaagggaatggcaccggcgggccgtcgccgtcgggtccgggtctctacaacctcggctacatcgccaacagcgcgaacagctcgggtacttccagccatggccacgcgagccagggacagatgacgaacaccgaccagttcagcgaaggagggggtggtggcggcggcggcggcggttcagagacatcggcggcggcgctgttcggcgccggtgggaacttctccggcggcgaccaccaccaggtttctcctgccgggatgtacgcgaatgatcaggccatgatgctgccgcagatgtcggcgaccgcgctgctccagaaggcggcgcagatgggctcgagcacgtcgagcgcgaacggcgccggcgcgtccgtgttcggcggcggcttcgccggctcgtcggcgccgtcgtccatcccgcacggccgcgggacgaccatggtcgaccaggggcagatgcacctccagagcctgatgaactcgctcgccggcggtggcaacgccgaccaccagggcatgtttgggagtggcagcatgattgacccgaggctgtacgacatggaccagcacgaggtgaagttcagcctgcagcgcggcggcggcggcggcggcgacggcgacgtgacgcgtgacttcctcggcgtcggcggcggcggtttcatgagggggatgtcgatggcgagaggggagcaccatggcggtggcggcagcgacatgcatggcaccttggaggccgagatgaagtcggcgtcgtcgtccttcaacggaggcaggatgcaatgatctcttaagcatatatacgtggcacgttggcatcaacatgcatggcaggaataagttgttgatttgcaggttgcaatacaatgctgtgacttgtgacacatgtgatagatgtttttgcatgcatccatgcaaaaggataaagccagctttgatgatgatacaatcttagcgagagacatggtgagcagaagagcttctcctagactcctactaatgcatgatgaagctagatcaacaggaatcatgagacttgagctgaagttaggcgttattactgcaatatactattctgttcctgatagatcttattgctaaatttcatttgaaagaataggtcttgctaaatgtaattgggttaattgtactggatcagggataactgcaatgagactgtattatcttcttctttcttttctgtcagacgaattataggtctgtgggggataatgagacttaattaccctactgatcttttctattttttgtcctctttcagtcattcagttaaccctctagagcaaaaatattgttcttgcaattaatgcagttaatcatgatatatagtccatgttgtggtgtatgtcgtttcatgttaattatgtcatcaacgtgtcggctgtgttgctaatatagatgggttatgtttactgagctcgaaattttaaaaagtagccgatgagaaactactagatctttctataacttctgttgctagtttatttcgaaggtatatagctacaatttccaatataactttttttgctagtttattcttgggttctatctatagctactaacattcacaatcaagacgaataatttaggttgttttgggagctagctggagattcttgaagtagctacaattcgccaaaaagcttcctaaaacaggtccataatccctgaagaagaacaagaaagaaaacaaagctaatatatttttatttttctccctgattataatcgattttttttatctttgtactattgttttcattatatatatacgggatggataaacaaacttaataaaaaatgattccaaccttttttttttccatttcctgcaactacatttaggtaattgttccaatatattcaaggggttgcaaaagggcctgtaacctagtggtttccagtatttaacggctttgtgtttttagtggtaggcgatgtacccgttgacagcgagacgtctgtggtgacttcgtcaatctccaggatttgccggtccagtcttcaaagatgctcataggggtagggtttacgtgcgtgcgttcatggggtgagtgtgcgtgcgttgtactgtgtaattctcaaaaatatatatatacatatatatattcaaggggttaattattttgcgactcattttcatttttatatagttagtatgatattcttttacccgtgtgtgtgcgcctatatatgtgattttgtaagattgataaattatgttaacacctagataacttgcaccaaaaggatctcttgaaaacaggagggcggtgcatgagtgtgatctaaagtgttgttgaataaaaatgcaccagtagaaatcatcacccaactcaggccatgtttcattttttgtttttgattctgccccaacaattaattttgaagaaaaacaaatagcttgattccggaaacagattagcaaaatcaaatcctgttttttttcttctaaaatccaaaagcaggatattgagctatttgtggattttgggtaatgatgttcacggcgagtattgcgactatttccaaatccacaatcaatttaagaacttctaaaaatcacaatccagaaaccggattatgtgaatcaaaagaaaaagaatcagggcctcaatttgctttaaaatagcttgagatttcctatcttatatactacaatttcaaagtatttttataaatttgtaataaacatataaatcattaatgatcacatcattcaaaactgcaattataactttctacattggaacatatataattgatttcacctagtacaaatctagccaacgttgttaagttattaaatattttgggataacgattgggttacatgtatatgagatatatataaaaccattgaaaagttataatagatatgcgattgatcaatatgaaatgtgatttttaagtcctggaaataacatttcaaaccattatccttttctgaaaaattgtgagagaattatatggtctatatattaattttaatattatttgggatttgaagtatttcaaaattgagtggatttcatagcctcaattaattctcaaaaagttggtgctttctgtgcagatctggtcaaattattaaaaactagagccactttcgacctatatattaattccccctctcaattatatgtttgacttctgtctcatagcgcatcactcaactaattaatgttcgaatttttttttggtccaaatgaaaattgaatgattccgattttcaacttgggatttaagtttcaaagagtgttttgcaacaacctcaaagacagcacgccaagcgggaaattcttctgacatgaaggttttgcttggggtgagggcacttgataggttctcgcatacacttggctatatatgtagcgagcaggggaactaagaagaatatatagctcatggtcatgcaatgacgagtttggcggctagctctatcatttgtctctaattagcttatcagttatgcaaaaaaaataaatctaattattttagagttgtttttattgtgtttgtttttatgcattaccttttaaatcgctaattaagaacacaaattaatatacaaattttacccataataacttttagttttattgcgttgttcattttccacggatgaaccgtagagtaaatgatgggtgatcgtacgtctgggcttggtactgccacaaatgattggctgcttgttgtggcgtccgcgagctagcaaccttacagctttatccataaaatagcgaaagcgtatctagtgagatgttatccacaacttaatttgccaactagactagttcatcataccgttgattggtttctctataatgtgatctcactgtctcggagtactcctggtatttttctttcaaccggtcaaagaaagtgcatatattcaaatttaattaaaattttgttcagattttgaatttatctcgatgagattttgctcaagatagaggccggttagctcttcgctggcactcctcaattaggttttgaagagagggcaaggagaaaaatgaaaaaaccgtggttcctatcgctatcttgcatactacggcaaccgtgtgacgcagggcgtatacaggacgtgacagcgatgattccccgtggtggggggacaaggtgttcgatcgttcggtacatgcctgcctcgatcgacgttgatatttcacaggagaacggaattagacaaagtcctcgagtacattctcttcttaattataaagtagggcatatacatatgcatgagtacgtccctaattccatttgtgcattaaaaaagttcagcacctagacggcaaaattaattagtcaacaatctgcaagcctcgatggcgatctctgcacgtacttttcgttggtaattaaagggtagcgcccaagttaatatatacttatagggtttgcttgcacgaagctcgcgttccattctgatgataattctgagggaaaacaagtgaatgtttggtagctggtgaaagcgacctttcgagatcgtctgtcgccacaggccacctagtggcgtcgtgttgcctgtatgtgtcgtgtccgtgacagaatactaatgatacagatgatgacgagcttaagatttggcacagtatacagttggtaccatatatgctttcaaacggaaggataaaaagatcaaaagagtagagtcttgtgtaaacagcatgctagaataatagcagacagctagaagagttctgcttgataaattgtttgtccttaatgactaatgcacttgtgtgtacttaagtgaaacaatcatggatatcatcggacgtttgtaatggccctcataatgtctaatcgatcttcaggaaaatgatggatatgctgtaccttttgtactagaagcagtacgcaatgtactatacaataattatggtgattgcaattctgtgttagtgttctggaagctctcagagctacagaaccaaattataattacattgcccagcccaactgccgggaacaaattaagctgttgctaaacttcctttttactaactgcatgaacctgtagaaagcttttgctcacctaacacttgtcattagcttgtgccaggttaacaactctgcacacacacatctgcactgctgctgatgtggcgcctgttttgtttgtagcgttgtcgcagcgtgccttggcctggatgcacggcgagatccttcgcctatagccaccggctgataattgcgcatctatactactataatatatcgcccacggtcacgggcgtgttctagtttctgagggccatatggccgggagaatccaatgtgtgaatatatgctggttaacatatagctttccagtaagcaaatcatagtgcaggagaagggagctgtgtgatcgctgtggcttcttctgtaggccgttttggtgttatgctcatgaaaacttcagaaacaattccagccgtgggtgcaaagcaggtgttgggtttgtaccaggtaggggtctgtctggacgagcggctggaataaattagtagaatataccatgcctttgccgtgtaggtagatgtagcaaagcaacatagctagtgtagagcgctcaggtacagaactattacatgttgactaggaaaatgtcctgtggcactgtataggatagttgctctgcatgctcagacaaactatttggaatgtatgtctttggaaaaaaagaataaaaatgaaagcaatcatacttagagctgtctaccatcaaacaactatttcaaccttgacattatttgagcaaaagtgggctaaactgcttaatgcaaatctagattctatgtaccaggagccaactaagcaataattttgtccgagacaaaaggctaataatccttgcgaatcaaggtgcgcatccaacaagtggaaaggaaccgcagtagctgagatcagcttgtcctggaaacatggcagcaatgtaattgtcaattattacatttcttcgacgatatgatttgagtagccacactgaaagagtctagaatcctcaacttctagtgttgataatagataaacaaccagatcatggtcgatagttcacagcaccacaatcattaacgtacacacactataggtcgttccgtcttagataacagggggcgactcaaaccgtcagacgttttcccccatacacaaatattcccaaacttagcagtagaacatgacacgtttgacattttccttcagatcaggaagcggccttacagcaacattcccagcaggcttagtgctgcgtgcaccaggaagggggccaccgccacgggtatgggcaccgctcgccatcgacccactatctgaagtatccggctccatgtaaaatcgagctcgaaatgccgcgagatgggcataatatgcaggaggaactgcagaaatcaaatccattgtaagaatatgtagccacaccgagggaccaaggggttaacgttttctaatcaggttaaatagaggagtcatctgcttaccgattgatacggaacgggtgcaccttgcatagctgcaataatagggttacagggacaatggttagcttactagtcttgtaataatgtactcctaaatagcaatatataatgacatgaaagaaaattacgtgtagcacaagttgtttgtcagagtttgcaaaccatcagcagtgaacttgttctcatcccacagaacatgataatgtgcagggcgacttgttccctaaaaatagcataaagtaaaatcaagtccatttcatcttgtaaaagaatgttttttttgttgcggagaagtaatatttgtaagtgcagaaaagctgacctgaatgcccgcatggctacacaggtagaaatcaaactcagtaggatggcatatctttgaatcaaccacggtgcctgaaatcagatgaacataaagaaattaaattcaggtaaagaaatgaggtgtcaatcatagggttaacaagatatacaaaataactaaaattacaggaaggcgacaaattacctggtagtatatttccacttctgtcaacagtgcgctggtccttgtggttattagcaaacagccttgtgtgatgacgcttctggaccaccacaaaggtaacgggtggctgataatcggcttccaaagatgcacatgcctagtttttattgaactgttagtcggggactagagagataacttcatggtgagaagaaaagtagataaattaaaatcacctttctaatggcatcaagctcataaaacagaacctgataaaactgtccttcactgacaccatccctgaaatgagagatgttaaatatgtggaaaaacagtaccaactgaatatgcagttgtgcacaaatgaagaaaattacctgtaaaatataatcctctggggtttctgtccagttgccctcttgaaagaaatgagaagctctctgcatatttaactaatagaatttatatatgtactactaccaagaaatattcaggttcaatgcgaactaggacatatatacctgatcattccaccacttacagttcctctttgaggatctttccatactttaaaaagatcctgtatcaattcctgacgatgggcctgtgcactcactaatccggcatatttggtgacctcaggccagtcttgagaagcaacaacctgcatgaagcatgaaatcaccaaaaacaatcagaaggcaacgcaagacataaaaaaggtcattgttctatcatatgataataaagagacggtatgcgtaacattgaaaagctatgcacttacagctgcaatggaagggctagaatcttctccaggatggggatgtgtaacatcagcaccaaaaatgatcgttggcctatcactcacaaggggaatcctccttgtcaaagcatcaacaagtactgtatttcttcctcccacctataaattaaaggaatataaattactacaaaataaaggtaaaaaactacaaaatcgggcaaaaataattggtagaacatttccgaaccttaacattgattttaagggcaacgtttgctaaatactgtttgctcatcttaaaaacatgcttcgtaagacagcattgcgagaccaatccaagatcagtctcacatatccttttgagatcgcctgaggattgacaagcatattaataaagacttttttatcagataacaatcaagtgttgttttgaaataaaaaggcataccataaagagaaccattattgtcaggcaatattgcaatcagcaggtcaagctccccgccctgtggtttcagtatattcatggcctcttgatagcgtgccttgagcgctctttccacatgttcaggtcttgcagtcactagaggaaccacaggatcaattgagaagtcctacaacgagaggatatgaagcatgtgaaaggatgttatggtccaagaatatacagagtcaaatagcaacactgaaagagatgtctggaggcaccattagatggaagaaaaacttaccatcccagatatttggcacataatagcaagctcgcgacagaaactcctagcagcattatcttggacatgacgagaaaaattgatgcatgtccagttgttaactctaccaccattgaccattttctgcaacaagcacattaaagaaaactaattgtcgcaactgtacgcaattatagttgggagacatcttgaaagacggcaaagcaacagttattgaagaacagaagaaaaccaatttttttgttggaaaagaaaaaaaggatagcctaatactgtttttaggggatgcttcgtataggtttgttttctaataactcacttctaaaaccataccttattcatcatattccattggccaattcttggcaagacatccttctctctgccactatcgtggtacttaagctgcaaagaatattagtcaaatattgaggcataacatacaaaaggcatgagatattgacaaatgtcagccatgtcttgaactttgatcttacccaggggggtggtagaacacgagcttcaacagatgcaagtcgctcatcgatccttatgccaaactcctgtgcatatggatcctgatggtatgcattgtgatgcacagtctggtcatcaaagacaaaacaataaaattataaaacttagaagccgattctgatgttccaatagggaacccgattaatggttatatatccaagtaacacaaatagatggtgagctacatttgaaatgtgttttggcataacaattgacatgaatcaaaccaccttaatatgtaaaaacatatagaaacagtttaaatccaaaattaaaatataacgaggactcaactgtgggtacaatagcaaagcattggatatttgagtaagaactaaaaaaacttgttttagagttcagacccacaaaaaattgaaataaggaaaccacaaaacctttacaaataaagggcttgccaatacataaggcaatacaaactctagatacaataacaagtgtttatacatactcaaatactcagtccaaaaagagtagataaaaattttacatgatattggaagaacttatatgcatggcctaaaatgcatatggcttaataaagaaatagatcaccaaggcatgaaacaatgaaatagcacagttttatagtacaacaatgttatagggcagttggaagtaatctgccaacaaaatgcacccataattacctgcaaaatgtccagctcacgctcttgagggcgctggcaggtcactttaagaagagcagttatctgcttctcatttagtctttttgagtaacgctgtccctccacaatcttacagacctgaaagttaagagtgatatgaaacacttttctgatatcataaaggtgcctatagcatttctgaccttaatgggtgttgaacaaaaggaggtttcatacttcataaagatggcattttaggacactaacctccattggtagataatttggcctttgttgattgcccacttgcaagcaaggcaaagttgtgtgcttaatgttaaatccatatgtctcctggaagtattgcaccaccgtcttcacagtaccatgattatcaatgggaaaactatacaggacaaaccaagcaagtgaaatcagcaaattatccaatcagacacacatctgcaaccacatgatagagaggcttcagatatgagcaaagcagactacgtacgacaactctcgtgttgcttgcgaggtaaggccagaaatgcgatacttcctgcgcatattgcctctatgtgtgacctcaacctttacaccccttagggccttcttgatctgaccaatgggacagtaaggaagcatgtaaagcaaacacagagaacacaaatatacaaataaagtagtcaataggataacctaaccttcacacgatcagcatcagataatggtctaactgagatgtctctgttcaaaagctgtgcaacaaagtcaatcacaggtagaggctcaatgaatgctgtcgatgacatatctgcaggacaaaatatcaggttaccccccagatgcaagagaaaagagacgtggtttgatgatctttaccaatatatgacaatgtacacacattctagatgattatcaaccataaccagtgacagataaatattgaatacaacatctaagattcaaggtttcccaatacaagtgattcctaatattggctgctattgtaccataacattagattatgataatttgctttgcaaccaacaagctcaattaatcgaaatttgtaatttatgtagataacttccacagatgtgcatgtaatttatgcagcttagataaactttcttactatcagcctacaacagaaagtggtgtaagtaggaaaaatactaggaaatgaaatattaaaaaagaattagcagttaagagttccatgtatcatagaaatctcctaagttattgtttccaaaacacaaatgatatttatcaatagtcagtcaaatagatcattcaatgagaacacagacctacaggttagtctaaagggggcaaaaaaaagtagctattctaaattataaggaattattatttttcttcgagtagtaacatggaacatgaaaacgaggacttggaatctgaccaatattcagagaaagtcccatctgcgtgggtcgtatgctttggtaaaaaccacgccaactttccaggccctcgccaagttgttggcgccttcctaagttaggcgaataaaatgaccttgcaactggagagtacctacatataaaaaatatagaaatgttcaaaagcttgctaacatgataatgatatagcaacaaatggcagggtaaatttaccttgcagtaggcaattcacgtagaacaatgtcaagaacttgaagagcttcttgaggagcatccgcttgccttccagctaaaaacatggctaaatggtggagatcagcgcgtgcagcaaatttgatcacgaccttaaatggtctctcacgcctgaagacaagcagatgaatcattggaagatgaatttatcaaattgttgaatgttgatatgtccagagagtacctctgtgcaccttgcccaacagcaaggctctcttcctcatcctgcagaataacgtcaaaggtcctagaagtaaatggtaatggaccagctgtgtataagctcttccttccatcatagactggaagacggccacccaaatgagactgcctatattgtgttacaatttctccaatgacagcacgattgacaccacgtgaaggaacctcaggagttatagacacctgaaagcatgttaaatgaaagctcatgaaaaacaacaaaagttacaaagcttcatatgtataagtataacaaggcaacacataaacaagatcttacatcatactggtgaaggtctttgtcaggcaattcagcaaagaaatggttggctttcacgatgcacctatcaccaaatgtacccttgccagggcgcattggaaatctcactgatttgctcgatggtggtgctggttgaatggcctggctagtggggctttgaccctggatggcaagttcctgaaactgatgttggacttcttcgctgctggcctcaacaggcagcgaagatgggccagttcttgatggtgatggtgcaaccaccgtagcttggtactggtcttgtgaggcttggtgcagctcgggaactgttcttgatggactggcaggaactccatgtccaccactgccactcctgtgttgtggcattcctccttgccgttggacaccacggccatagtactcatgtgcttgatattcaaccggaccaccacctggttgatgtgatgttggccctccacgaccctggtaacgtccaccacgtccctggtgttgtccaccaccacgaccagcttgttgagcatattgaggattggcaggttgccaaccaccacctccatgctgttgagctctctcaggtcgctgtgaaggaccccgtccaggagctccagtggcttgttgagttccagaactttccccagcattacggggttcagtttttttctttctcatcatggctaaagctgcaatgcaaggtgcagttatagctttagtattattattatcataggctaatacaaatctaaagagtgatggaggcccaaggcacaaaatcaagtgcaaaacagataagaaagtagaatgaccaggcaaatactataataaatagaaagagggaaatccatcattgccatacaatcgaagatactacatctgccacattgaatgacctgaattacaacatggtttataatctttcaggcaacggcggtacagcacataatattacatagtctttgccaccatattaatgatactatctttgttatgtccccaaatacccccaaaaattcaaagtatctttacaaagtgcagctgctcccagattcatgcattaaaagaaaaagaggagttacaagcaacaagataaacttttttctttttccacatgagatgcagtgatcgacagtagtcaatactcaggtcagcatgctaaaaagtcagagaaagtgagcgagaatcattgtgaatactgaataggacgaaattcgacaaggtaattaaacaagtcacatcatcctaattcccttgacaatgttagaaagccacacaaatatgacatgcatgatcaagtgggagtaattttgctaaagaagaaaagtaaataatagggaaatgggagagatgggaacttggaaatcccttgacaatgttagaaagccacaaacaaatatgacatgcgtgatcaagtgggagtaattttgggaaatgggagagatgggaacttggaaatgaaatggaagtttgatgagcaatgtagtggaagtaattttgctgaggaagaaaagtaaataatagggaaatgcaaaagaaaagaaaaataaatgggtgcagcatcatcttgcatcttaagtactcattaggttttccactttcagaccacgccagcatcatcttgcctgtaagtactatgtttatacaaagtattaggttttccactttcagaccacgccagcatcatcttgcatgtaagtactatgtttatacaaagtattaggttttccattttcagaccacgccagcatcatcttgtatcttgcatctttaacttaagtactatgtttatatatatcggatggattgcatatatggttgcttatccagcatcatctttctttgcatcctaaatactatgtttaacgaagtatatatcggatggattgcatatatggttgcttatccagcatcatctttgcatcctaaatactatgtttaacgaaggattaggtatatatcagaaggattgcattgattaggttcttttccaaataaatactatgtttaacgaaggattaggtatatatcggaaggattgcattgattaggttcttttccaaataaatactacagatcgtgtataacaatctgcattgtaaacatcgaggtaaatcaggtagcaatagcatagaacaacatcgcatcaaccaacaaacaaaggaaatcaggtagcaatagcatataacaacatcgcatcaaccaacaaacaaattacaggatattgcagatcaaccccaacactaacacgtctcactcacgcggggcacctacctcggggcacctaccttacaaatcgagacggatggcccgacagggattgctgggtaggggaacgattagagcgctggaaccggtgactctcccccttcgtcggcgccggcgccggcgcaagagccggtgcggacgagcgcgggcacgacgcggcgcgccgggccgatggaggaagacgggcggcggcggcgggcgagcgcctagcggtagcggagccgaggaaggaggcggcggctgcggaggggggtcgagggctcggtgcgggtgcgggtgcgcgtgcgcggcgaaggggactaggggtaggggaggcgaggggcgagcgaaccggggtgaggacgagggtgacgggagagcggttttgggcgaggtcggtcgtgcactcgtgggctgcgtgtggagacacttttatcctttctgctttattttcgtgtcaatcttctccctgttttcctccgtattttaaggagtctgaaaaaccgaatggtaattgataaggagaaacatccgttttataatcttaattgctttcctaaatagatttctaagagcaccagcacattagcgataatctatacccaaaatttgatttttttagtttcctaaactaaatagggagtgaaaaagctcaaagatagcctaaatttaatcccaaaattaaaagtggatcttttgttaaactaccaatagaaatttctgtttttttcattccacacccagcatgctcccaacataaattttcagcgctcgcacacgtaccagagattgagagtcgctctctcaccctcaaaatccatggggaaggagagagaaacacaccaactagagatggggagttgctctcttacctttaaatccacatagcaagatatatggggatagaaaatccaaaactactgcagtgctttttggatctgttggatcggattttttcactgaaatctctcgaaatcaattttgggaataaaataggatgattgttggtgatattaatcccttgaatttgttcgcttctacaccctcgtatttcaaaataaatacatctatcgaaaaggttattctagttaaactcttctagtacttcttgtatgaaagttagacccaacaatggatcggagggtatgtataatagatactaccaaaattttatatttttgttaagacttatcaaattttgatttggtattaagagcgaaacgtccttgaatttttaaacactttaatagcggaagttgagtgttttaactatatctagtctattatcttaaaaaaaggtaaaattgaaaacttcaaggaccaaaacgtgcataggtacttggtataacattgagccacgatgctagtaaagcacgattttagactgttattttcgctattttattagactgtttgttccacgcgtttaaacatatgttttcccaaaaatattttcttcctttccattatttagataactcgttaataaactgtttgctaagcctatttaaaaagtaataatttatctttataataagtagagaatccgctctcaaacttgacctaaacgttgctgtggaagccgacagtgtagcctatcaagtctataaggacaacaagtccatggtcaagagctttcggaggataaaaccagtcactccagcatcgtatagaagcgaatgcgacgtatacaagtttgaagtacaaacatgaaaatctcaagaccacaactgccatgtactgttgtactaacacgtactacttcaagtcatccagtacgtagtggtacttttttatggatggtttttactcctggttaaactttttttgaggcctcgtagaagatatacttttcttgagatgtgcaagtcaatctgcacatgttagactagtctatctgtttatgcaaccggtttgatctatgcacaaggaagaacaagcaatcgccaggtttactggtaaaccgtccatacatatagacagctgcttctagtagatttggttgtgttataataatcgttgttaaaggaaatgcgtactaggagcagtacacatataatgtagggaaaaataaaaggaaaatggagtacacatcgaaagatgccaagtggggagtgggccggcccgctgacgcctccctacatgtcagcagctagccagtgggccagaggcggcttcggcccactgatggaaaaaaaaaacctggaccgctaaagcctcgaaacgtgtcaggtggggtccacctgcaaggcccccaccgcacgcacctggtgcggcacccacgacctggcccgcggggcccttcctcggtcagtgtggcttccgttaaacaagatcgcgcgggccccaccaacctccgtggctatttcggtttcacgtggattagaaacaagctttgtcttcccattggttattccactattattgtccttggcttatctgccaaatcgcgagtcaaatttcctgctcacctgtcgtatttggtacatttcatttttcctaatccttctcatcgaagttgcaagcatattgttcatctgtcaaattcgttctcctgttcattgatttgattggctaatgttctggcagtgcgaaggtttgctggactcaccgagagaacgccagaacggcagcatgtcgacactcccggtccagattaacccagctccgccgatcgaacattcgacggcagaagagcctgtgctagcaatcattatccctaacctgatcgatcagccgatcctctcaatccgtctcccggcccaggccgcccccctaatttggccgtatcccggtgcacgtcaaatcaagatcaagaacgacaaaagggggagctgcatccaccagcgacaggggaacaggttggaaaacaactgctttgttacaacatgcacgggagactatttagtaactgtagcactaacaccaaccgcaacagtctaatgggcatctcacgtacgtacagttcgatcgacaggcaaaaactgtgttcacagaagcaaagaagggaagaagaatcaaataggaagaagaagaactgaagaagcgaggatcgaggaagaaacagcgatcgcgatcggagaggcaactaaaagcgggaatgcgtgcgtaccttgatgggagtagtacccgttgtccaactggaaggccatgtgcaagaagcttcgacaccgcggtcaaagccgcagcgcaaaggagctagcccctgatcacttcgtcgatcgccaatggcggatcgattgagatatatatgatatatcccgcagacagagtggaaactttctccttttgcttcctagggacggacgacgaatcaggaggaggagaacaaagaaataattggaggaggtggaggcgagagagagaggggtgcgtccttatagataaagaaccggtgtttgatttggcggtgggtgtggtggccgctcgcgcgcgagaaagcgacaccgggggaatcggcgatggtgtatgtgtagtattggcggacgacgcagcagcaacgcacggtcgctacctgcaaaccagattgctatctaatctagctattatctcgctgctggtgaagtggtggcaatggacttaatggtgaggcaccacacgcactgttcggaaacagggaggccattggcacccatttgcagctgtgccttagctagctagcttgccctgcagattatattgtggctaatgaagtagcttgatttggccatgctttctgctcctgctagcaagatcaaactggcgatgattaatgttattagccgggagttgtctagctaggacagtgcgttgccttcggggttaattaggaggtgacaatgacatgtggggccctggacgggaggaaggccaattccagtacagtagcccggtactccatgtcactatttatcagggtcgttgtgagtggtttcgagcctcgaatatgtgatatagtacgcaggaaagagacggatcactggattgacgctttatgtggctctgccgcttcgcgccaccaattggttgttttcagaggcaagtggccagtttggtttggtgcttatccttttgcaactaaacaattacggagaccttaattccatggcctatctatacgactatactgtatctgctttacatattcaggggtttgtttaacgcatagagcgcctagctagtcacacgccacaatggccgtgcacaaaagcatcggttaatttccggcaatcgcatgcaaaggcaaaggaggttagggggaggaaagcgagcattaagccattaattcccctgtgattgttgtgccctgtttcgtgatcaagttgcaatgagacgggaatatgccgtgcactcgtgcaaccctcggcttttgcacctactcgagaacaattaagaaaaggcaagtgtctgtctggaggcactagtagatagcgtactcgttgcgtgcgcaggtgtaaagcgcaacggagaccaatctgggtgtgcgagcgagcggcagcgactgcgaggcagcatcaggatcgcagagttacaagttgcaaagttgcaaggcctttccgagctccggcggcttctctcggttcgcctgcgagtgcgaggcagctcatgcacgcgttgtgttccccctgtctcgagagggtgttgtactgggcctctagtgggcttctttaggctacaattcatttcgtcggcgaatttcctataggaataagtccactttgactcccttaaaagtggctcgaatctaatccatgaccctaaaccgcaaaaccggatatctcgactccgaactattgaaaccggtgcaatttgactcccttggtggtttggagggcggtttcgctgacgtggcgctgacgtggcaatgttgacttagtatgtgggttgacatggcgcttaggtggcatttgaattaaaaacgcatacgtgggacccgtttgtcattcacacatattaaaaattgtggggcccactgatcttcctcccttccctctttctttctctttctcttctcgccccttcggccggccgcgggggtcacatgacaggttgtagcggcggcgggcgggggcagagcggcggcggcgagctcaccttccacgacgaccgcgtcgacctgcctcgccacgacggcgggcgggggcagagcggcggcggcgagctcaccttccacgacgaccgcgtcgacctgccgcgcgctggtcaccgcccaacgccccggcgctgtccatggcgcgtaccgcgcaggccaacggcgtgtggttgtggagctcaggggagagtccttcacctacactcgccgcatttcatgccctaggaggctgccgtctcggccccccatggccggaaccctccacgaccccaactccgggtcaggaggcgaaaaatggcgcccactcctactactactcccatggtcgcgccgttcgcccagtatgtagccgactcctcctccacattgcaatccgccgccgccgctctggcccccacccaccgccgttgtagcctattcccccgcggccggccgtaaggggagagaagagaaagagaaagaaagaggggaggaagaagaaagagagaggggatgacatgtggggcccacatgtcagtgggccctacaattttcaatatgtgtgaatgacaaacgggtcccacgtatacgtttttaattcaaatgccacttaagtgccacgtcaacccacatactaggtcaacattgccacgtcagcgccacgtcagcgaaaccaccctccaaaaccaccaagggagtcaaattgcaccggtttcaatagttcaggtgtcgagatattcggttttacggtttagggtcatgaattaaattcgggtcacttttaagggagtcaaagtggacttattcctttgctatatatatgccgttttgttttttttccttaaaaatcatacgttttattttgacatatgattttcactggatttcaattttttaccgatcaagctgtcaagttagacctaatttcatcctttactcatttactccctctgtttcataaaaaatcaacgtagtacacatctagtattaggttggttttttatggaacgaaatgagtacattgatatagtccagctacacgcatgtatgggttggtttgattattcaaaaaagtaacgattgaatgaaattacattacaatttaaatgtagttataatgtaattaaattatctttatatttgtaattgcatttgtgtgattttgagtgatatataactagtctctttcgttagagccgacatgcctaggtgtgtattcggttagactgataaattcagtctaggtattcgttctttagtagatttctgtcaatggaaattaaagcatgatcagctctgaacaatagaattaaagaccgagcaattcagtcttggtcatgaccagattggacaatagaccctatgagtgagaattgaggagcataggcattttgcaaaaatctagctataaacaaacatcagatcagctgggtgggtgcaggattcacaattccgatgaaaaccaatcgaatttcgcgaaatttcgaggtttcgacgaggctttttcctatttttctagtcaccaattgaaatttcggttatttcgctcggaatttcaccaaagccgactggttttcgcgagctaatcagtaaactcagagaatttgtattcaaattttggtttataaaatttattcggaatctaccgacttttcaccggattttgcgaaaaatcgtcattctgtgagagcccgaaacggaaggttatctcggaatcgtaaaccccatgtgggtggggccgtgaggagaggaatacagagagagttggctgtattctttaacttgaggttcccaacctcaccccctcgtttactatatatattgttgggctggtggtgggtctactatcaaatttctatttgttaaagtatttcagttaaccatgaaagtggccgaatggaccgaataaaaattgcttagatccagtgattgaattaggttttatttgaaatacaaaatgggtctaaagtttgtaagttaaattataaggggtttaaaatgttataatttctttgaaatataaacaaaatgatcaatccaaatattaaaaattattcacggtcacagacccacgattatttgaagttaagtaacaagttctaaaaaatttttagatctgaaaaagtatgccaaacaggataaagtcagcggcggagctagcgtgggggcgggggctcgagccccgctaccccgctggactccatggaaatatgagggaggaggggggggggaagagggagaggaagaagaaaatgggggagagagggggctggaggaggaagaagaaggttgagcccccctctcctccaaacctagctccgcctctggataaagtgaccaaatttctcggtccgagtcttttccgtttacgagttatgttccagtatgttttgcacagtacacgcctaccgatcgacgtgagctgtgtgcccgtgtctccggtcccttgtgctgttcgttcgaccgaacgacgtacgcgagctagctactagtatgccgttgtgccccgccggcacgccgccctctcgtgcactgcgaaaagcatctactacggagtacatggtacgcaggccacacacgcatgggccgtgatgcgcgcaggcagaagcgcgcgcgcggttgctaaatttcatgtacgtactccccggtggtccagtgggaattctggtcgatcgcgattgggtcgcgcctggacgcgcgacggctcgtgtcgtactgatcatagcgtatgtcaattgtccagattcatatcatagtttaaaattgctatattttgagatgaaggtagtacgtcatagcgcttgcgggcggcgtgccggtgcctagaacggaagaaaccaacaacgggcaacgtgcaacgagcggtagtgcgagaatcgcgtctgtgtctctcaggttttccgagtaacgacgcgattctcgcatgctagccacagggccacatcacaccatgatcgaccatgtacgtttcgatcgagcagtcaaagccggatcgtcggaggctcggagctagctagccatgtcacctactacctagctagctctcgatgcctatatgtacgtttcctccacgcagcaaggggtgaggtcccggccgttctgaatgtgcctgatatattcttccatctgcgccgtaactgcttactgcaatgccatcaaacagctctggccacgtaggctcacatgtactcgtgcaggtatgcataaacacacactggtaagcacgtacttgtacaagctagctagtagcctgggacgaatctaacatgaagacggtgatgactctaagcctccactattaacgcgagggccataggagtcgccacgaaacccctactaaacttttttacagaaaagctaggagagttgcagttttatctagtctgcttagtcctcctctcttcccttatacgtcactgggagtaactaactacgttagctccaccgtagctagctagctagcgcaatgtacagcggcaattatatacactgtgcatcccatcgatcgatcggtcgacaaaacgtgcagcgcgtttcctgtcgtccgtccgcccgcgcgcgctttctgagctgagccgagcagcagcagctagctagccatcgatcccattgaattcccgctaatgatggccgcgccatgcatctcgcgtctcgtctcgtgatgcggggcgtggttgcgccgcgcgcgcgcggatccgtcagatcgatcgctattgccgatgcccgccgcctggcacgctgtcgcgaaccctagacggctaccgcacacgtactccgtacgtagtacgcccaacgatcgatatatagcagccatgagcgcatagccatcagccaaagcccacaaggcaaacaccacacgcgcgacgtcagagagagctatagcgcttgcgcgcgcgacggcggcggcgacaagcgaaacggcgtggagagtgggagattgatcgatcgagcgagtggtaaaatgggaattagcggcgagaggaagggagccgcgaggcagtacaacaggtccaaggtgccgaggctgagatggaccgcggagctccaccgcagcttcgtgcgagccatcgactgccttggcggccaacaaagtaatgcctcgatcgatcgtcgatcagatcagtcacttcaattaattcctttctcctgctttcttgctgatctctgcttcgatctctctctggaacgggtgttgtttatccatttgtttgttcaccctcacttacgcgtgcgtacattcatgcgatctctgtcttccaatggcctcatgttctcaatggcgttgtttaactgcagaagcaactcctaagctcattcttcagctcatggatgtcagagggcttaccatatctcacgttaaaagtcacctacaggtcagcttcaattctcccgttcttcaggcgttattttgctatactagtcatcgaccatggaattataagaaagtacaccagaatttactgtttgtttaatttcgacagatgtacagaggcacacggcatggcattggacaaaacggtgaggctttgttaacttagttcttctctttcttgggaattgggattggattatgctttacaggagctgattatagtgtaataattcgacaatgttatacgtgcctaattattgtatactaattacattactctatctgaaacaagagatctaaacttcctgaaacttcccagttctggttggtgtaaattaggacctcactttgtggttgtggacttgtgggggctgtaattcttcagcacacatgtgaattgctaatggaaagctaaaccgactttattcttattcttttctcatgttaccatcagatatgcagccacagctacatctgaagcagcactcattcggcagtgatgagcagagccccaaggaattcatgtgcccacccataaaaaggttttgctgccgctagctttttctagctagctcccaatagtgctaagttaaaaagattatctttagtggcctaatctctttaaggcacaagcaccttttccatactcattctctcgctcttctctttggatgaacagggccaaggtagggacagaagcttcaggcaaatacagatgcatggaagggagcagtgacatgaggagtagtgctcctcctgcaggcacccggtacttcatcgatgattgtatgcgactgcaagaagtgtccatggataggaggagatcagatcaacacgatgctgcagctgccgctcgtgctcgtgctcctgctgctgctgcttcaagccttcatcaggcactgggattttgggtgcagggaagaagagaggagccctttatggtacaccaggtaaaaagaaaagctaaaagaaaccttagctagggcaagaacaaaaggcttatcaaaagaagatacatctagctctcttgtcttaactgctttgccgccactgatctttctcttcacatgtctctcactatctctagtcttttcttcctagctttatgcatattgctgcatggttggcgtaatatttttttcgtataattctcccagatgctagctagatttgctgatacctacctcctttccctcatcgtgcatactataacatgttcacttatatggaactggactagagtgtccaaagatatactaggacactttacctattaggacttgggagtcatatctctgattggcatcgatatgggcatgttcatgcacatcccagcaaaggtcaacaaactccagacgtgtccttcaaaaaagagagagagaagaaaagaacaggattaatagaatttatacatagtatagaaatactaggacagtgtggtacatacactgtcacagttgtactaggcaccagtatatataggacactgccacaaatggcccttgagagccctgttttctgataggaacacgacggtggtgtaactttgcctcagagcattcccttcagctcatcgacaatgataagccaaaagaagtggctttttgcagaactcggttgctatccttgcagttgcacgcagcagtttcatgatggacgatgatggcgcggtgcggacggaaagaacaagatcatgaaagctctctggtgcccctgctccggctgcaaattagtagcaaaagttgactagtgtcaaatattttgctttggaagcacattagctcgatctgtagctccttctgtgtgttacagtttcactgcactcgtatatatgggctatcaacctgcatatcagggaaataaatttgacagttgcagcaggacaaaacaaagcctgtcttgcttgaaatgcagttaaacatttagaacagtttgatatatcttcctaacctttgctgtgtcgttggattttgcagattagtaaacccaaagcacatcaactgaaccatatggtcaggaacatgaagatatcttgcaaggagaaccacgaaagtagattcttcatggtgagaagtgcaactagagatgaacaagtcaagaaacgcgcaccgccgctgtcgctagccgtcgaccagaaagctgcgaacgctatctcctcctggcccagcgaggccagctgcgttatctcgccgtcgccgaggaacttcagtactgactgctctgggcctccagggtgcagctttgttggccggagagttaacctggaactttccctgtcaatatgtggatcataatttagatcattaatattaataattatggtagtttttgttgatcagtccctcgtcatggtgctattactaatttctgctgatctcgtttctcgtgaaacaccctcgaagctgtgattgctgatcgtatggatcaaggtatcagagcaagttcaaacttataagctagctactcgacacacgatttacagacgagtatattacttcctccgtttcacaatataattcattctagcatttcccatattcatattgatgttaataaatttagataaatatatatgtctagattcattaacatcaatatgaatgtgagaaatgctagaatgatttacactgtgaaacggagggagtacacaatagcaggctacacggttcctaaacatgaactcgctccgtcccattttaagagcggacttgagttttcgtgtccaactttaattgtccatcttatttaaattttttttatgattagtaattttattgttattagattgtaaaatatgaatagtactttatgcgtgacttatgtttgacaaatttttttttatgattagtaattttattgttattagattgtaaaatatgaatagtactttatgcgtgacttatgtttgactttggcaaggcctctggtagaagtggctagaatttcaaacgcaaaacagtagcatttcagacatgtacccttttttcccctcatttgagctttgtgtgctagtttggccgcgtttagttcctcctccaattttttcttgacgtatacggacgcacatttgaagtattaaacatagactaacaacaaaacaaattacagattctgcctgtaaactacgagacgaatttatcaagcctaattaatccatcattagcaaatgtttactgtagcaccatattttcaaatcattgcgtaattaggcacaaaagattcgtctcgcaatttacatgcaagttgtgtaattgtttttttttcatccacatttaatgctccatgcatgtgtccagacatttgttgtgacagaatttttagaagtttgaagggaactaaacacaacctttgtccattatctttttcaaaaaaaaaaaattcccttttttcaattcacctccttaaccctagttagacacatcaaggaatgcaaactttgggccctcatgaattcaaatttttcacaagatctttgcaacataccacaaatacagtttaattcatacatgaactatgaaaggtctgcacattttaactagatatagtggaaatgaaatgagggcggcctataagaaaaatcacccattaccagtttgccaccgactttgacagctcctgcatctgcaggaatgtgctgaacaaagaagattcctcctgtcctgaaattgttattccttgtctaaaggcattcagcatatataaaagaatcaggtgataattttgaggttcgcaagtgtatatataaatggaatttcagagtagcatactagcatcagtagtgatagctcacatgttgcacagtatattatgtgtcaggagatcaaacagtagtagcttaaattcaggcttgtatttataagcaatatgtactcatgggtatactgtagtagagctaccatgtgcttttctttcttctccctcgctctgctggaaggaacacaaacagaatgattaaaacatagtcagctcatgtgcgtgcgtgtgttgtctgtttcgagttgttgtttctcaaaagcctaagagaagcaaacatgtcacgtagaccactgatttgctggttaaaagattgacaaatacaacactattctggtcgccaaaagtaaagaaaacatctaaaaaggtggttaggaatatatactcgtcagtttctgtgcttacctttgatactgcgaatggcatcatcttttgtcaaaatcaaaccatttaccacttacccaaaagtttcagactgacagcatctcatctcaagtacacattattaccatgatgagcaccacagtagattgcagggaaaaagtacggtggacgaaacaaaagccatctcagtagctgcttcttcagcaacatgcatgcttttgtctgaactggccataatagataaagttcagaaaacagtagaacaccataatagccagcgacctcatggttttgacatcgcaacatgcaaaaataacgacaagaagtaccctccaagagctgcatgaacgaactctgcagggctgcaacttatacactgacctacccaaaaccagccaaacagcagttggtggggactacagatgatatgatgcgtagaacagcacgcaaccatggaagggtttgatgtttgttaaaccatctcgaccatagaagattcaagctgccgcagagttgtaaacttgaaatgagcagactgatcaaattgtatcatctgtattatgcccatcacggtgccatctgattgatatcaaccaaggaggcatcacttcttctttgccgcttttgcatcaggcaccaaagccttgacacagagacgaggcttagtcgagatgagttcagacgggagaacggacaccccagccactgaagatcccagggataccccagaaatagggagcatctccactagtactgccacctggacattagaatatatcatttattgtgcaaaacagtatgcaagatttatgcacaacagtgcaaagcaatttccaaaaggccatagatctaaaacttaagtttttctctgtatttaaagtaaaagaacagagaatataattgcgtattcaaacatgatagtgcagaagttatctaaaagtgtaagttgtcctctacgcttcaaagtaaaagagcagataagtatacatagaattcaactttacatagttattatgactctggataaatggttccaactttttatctcactagtaaattagtttgtttcattttactctcatcactcctcgtttatattattgaaaagtgaattataacatttggaacccatggtagaagccaaaaaacacgtaaagttgtgaactatcagaaaacctagttggccgttgggtttcaaagttcaaacaaaaagacgtggtgaaagtagaggtatacttagcggaccaaaaagattattattgaacaatcttgatgatgacaactttgatgaaaaatattgacttactgacatctgctgcatccaaaagtaaacgtgctgaaattgcaggatgtcagataatcacgtgtcaatactgtccaaagactcaaaaacttatctcagttgtcatcatgatcgagtggaaaataacacgctaacttcactagtcagcattgataactttgttgtttttccaatttggtgtctttagattatggttctttaaatcctccatgttagctggcaagtaactctgctaaagtattgagaggttcattcaaggaaccgattttacctcaggagatctgagatccacaattgagttctcagcaactgatttgacggcaccagcaacgaccttgaagcattggtccctgtccattaaagtttgttgttttgaaccttcattgccattcttctgccctttcatctctgtttcatcaatgcctcttctattatacccaactgcgaactttaccataggttaacattatatgaaatattaacagttgatatgtttccacgagataatgctgccaatgctaaagcccatgccattttcaagatagatacaattataaaccgttcaaagcatgaagctatttcaatgggtaatgattaggataacagaaatgcgtaattttgttacttgtgcatagcattacagtaccattttagagaactaaaccaaatacaagaaatatttttaactcaacacatgcaatggcaagagaactggatatgagatctgcaatggcaaatatatatcacaaaagaactggacaagagaaatccagctatagaactggattgattggattccatcaacggtttaatccaatcagtaaatgtaagcagtgcaatatgctgtgtaccttgataggctcatcttggtcttccttactctttacaaagtcaagaaataactttgacacagtagtatgtagttctgcttctgacagaacacatgtttcctgaataggaaatatgcgatgacaccatctgcccattgaaggttgaatagtttcaaatcagaaattttccagtgcaactagagtcaatcatggcatacggaattggttggcagaaagacgcactgctgccatatttcttgaacaaatgaatggtaataggttgcataaatcaaatcgctatgatgcaaatctagaatagaaaaggacaaaatgataataatattatcttcttctgctttcttagtgatctggtctacactgcacatcattcacacattcagcatattagcagaaagaagcaagcaagcgtaacatattgcgcagtcactaaacggtaccgaaattaacaagttttgaagttgaaaactgaatcaaggttgacaaacttaactatactcttttaaaagggagtagtggtggtggtgagtggtgaatctgctagtaaaagaaattatgctagacaaagcgtgctctagaaatagtatgttgtaatatgtgggatcgcttattacttttcggcacttccatatgacagctgaagcctgtagttaataaatcaactttgttaacagcattttgagagaatgagtgtctaatgaagttaagaacttactgtggagatttaagcttgccagaatgcagtgaatgaaacatttgtgtaagcatttgaacaacacgaaggcctccgctaggaaacgaaaagaaaagcaagccacttcttgacagtttaaccagtgagagatttgaagtgtcgtcaacatttttacttgttttggagtgaggtgaaactgagtctttttctacactgcctgttacagaaccagaaaagacacagcgttagaaaaaagacaggtaaccaaaccatccaaaatcacaccctttagattgaatgaatgaatgtggctaataagttatgaaatacaattgatgctaaccagttgtttctgaagcatcacccttctcatatgttactgcatctcctgaattttcaatatctggtgtctcggaacatattttccttttctttgctgaaacttccgtatcacttggttctgacttttcagaactatagctgtttgcatgaccaatggactggcgaaaaacagtagcacacccagtatatttcagaatagagtgtaaggaagatgaagtggaaaatggttgcccaaagtatgaataaactaccacaatcaaaggtaaatactacaacttaaagttgctctatacttgcaagatattcagatggtagcaaatgtgctgtaacattaagttttatgtgctagaattatccattgcagaagaacaaccaaagaataaggagcaagacctacattttcaagaatggaaatggcttcctttgttgcgcttttctcacgttctgtaagaagatgatgatcacatcaaatttttgcagtagtgaatagaaattaagtgtatatgtagaatttagctatatttaagatttgttttaataaatatctttgtaagatctgtcacagggtagcagctggattctaaaataacccaatagtaggaataagatcaaaacagggataaaatgtaggataacccagatcactcaagaccagcagaactttccagaataaccgcaacctaagtggtttggctgatgcttcagcacattacatacctaagaacactcctggctacacaagcggttacagattttattcaatccttgactcagtgagcatgttacaatttccagaatgcacatacagcagaccaaacatcattacttatttttttaagacaatacacctttggtctctcaactctttccatggtttaagttttcacccccaactccaaatcgtttgaaatatgtcgataaacttttgaaagcatgcagatatcccttgcaaaaaaaaaagcatcagttttgccatatgtctagttagtgtgtatttggcctacttgtcagccccctctcagcttcatcttctagctggactacatgaggactgaggacactggcaagtatagcgaagttttttcttctcaccatatttttttccttttctcctatactgcattatgacaaataaaagtacaatagttgcaggtgatccaccacaaatttataaactatgccaacattaaacagttgtaaatttgatttacttttcagcacatacaactacagttcatcaactactaactgacaagtcaacagaagaagtgtctggcagggtcgagtatacaaccattgggtaagctaaccgatatccatacaacaatgtactaaaaactcatacaccaaagtcgaagggtaacaaaaaggtagttagttctgcgcctccaatatccacatctaatgatctaaatgctactagtaccttttagcgtcacaggggtcactcgaatgaatccactaacaaatccaccacctgaagtatctagtcttcccctacgtatccatatccaacaaaatagtttttgctaaaatagcacgagtaagtctaaacatggatgaggggcacgcactgatggggcaggtgatgaggaagccggagtgggagcggaggaggagggagcccgacgcgcggtagtcgtagcgcgggaggtttatcaccgccgcgtgctgctcccatggctgcagcggtcggtcgctggctgcggcggcgggggcgggggcggcggctggtggctcagttggaggctcgcgggccggcggtggggtttcgatttcgggcttcggctccggttcctccgccgccgccgccatggagaagcgccgaggatttctctctctctcttcggtcgcactttgggcggcgccgaggtccgaggagggtttggggtttgcagacgtattctgttaacctgttaactcgatccgaaggcgtatttctgttggttcccgtgaactcgaacagaaagcgtattctcttcctttgcgtaaactctcctcacgcgcattgcttataggatcaaaataatcgattagagttacacatggaaaagtctaggaccggaatctgatatagtcacggagcttttcttactaagttgatttcagcagctgccaagtactccatatgtctaaattcattaatacctatatgtatgtgggaatactagaaagtcttacattgtgaaacggataagtacctgagatgatgctagtagatttgcgatggccggtctattcatcttgtttatgaaaagatacatctgggtccaggtatgaaaaaacgtacgcataattggaagactatagacaccaaccttacaatcatgattattgaattattggtatatccatgtcctgtcctgaaagaggctatttttgaacaatttccgtgtttgtgcagatacgatatgcacactgttgtgtgtttagggtgctacttacctttatttcagtgaagcatacacaacaaccacacgatccgactcatgtttttgaaaccttacaaatatataaagagattgatgttgtttatcgttgggtcgatgaagatgccgactgatgtatattaaggagaagggagaaaactttacgaacataccctctctagagggagcgcaaatacagtgcgtcggtacatcgcctttacaacattaagaaattacaataggttgaaatctctctgaaactggtgttgtggcaatactcaacaaactaaagagcctttgattttcaagtttcccactcatcacacatgattgcacacaactaagggaccgacgaggttgttccatcgaatacccacatgttgcgctctttctagatctaccaagttacgaggatgactccggcgtcgaacgtcccacggtcgaccttggaaacggagtgctaggcagtaagccaccaactgggaaagtccgaagacgatggagaacaggagagactcaaacgagtccgaatctgtacccaaacctgttgcgagaagggttgagaaggggcaaccctggaagatgtgttagtatgactggccatcattggagcataggtgacaaattggcgcgagcttccaacctcgccgctacaggttgtcagttgttaaacaagcattgcggacggcaagaaacatgaataacttgtatctcgccggcgcgcgggatttccaaatgatcttgccgagagggcttgtttaacatatcgctaaaatttagcgttaacaggtttcacaaggtgcaaacatatagtgaaatcaaacttcacgaataacaacacaaatatgaaaaatatatgaactatgaatccggcattggccatggacgattaagctcgagattaagatcactttcctatagatactaggaataaaaacttttcctgagatcacattgagtagtaattcaacctgataaacaaattgcactcagcttcgtgggagaggcaggaactccacattgagtagtagttcaacctggcaaataaattgcactcagcttcgtgggaaggatatgcatccgataccgagatctaacgattagttgaagaatcggcgtgtctgccaagattgaagtgcgtgatgtatatgaaccgacccatatcaagatctaacgattggtcggttagggatggagttaccgtcaccactatgttttattttttaaagtgtatatagtattagtataaatatgattctcaacgaaaagattagcatttttttgtccattaatttgcaggacaccaaatatgaacagttacaaactattaattgagatcagagttgctagctagatactacgaataaaaacttctccaggcgcacaccatgttgagtagtaattcagcctgaaattttactcagcgtaaataatccaatctggcggatagcttcggcgcgaatctctgaagcatcggcttacccgcgacagctgcgccggacaggactccgccgaggatgccggcgacgatcatcgaccttgggccggacgcgatgcggtagagcgccccggcgctggcccccgcggcgacggtgttgacccagtcgtcggcgccgtcgcgctggtcgcggacgaagctctcggtcccggcgaagagcatcgcgacgatgccgaaccggttgccgaaggcgcggccgacggagccgctctggttgagggcgcggttgatgcgcagcttggcggactccccgcgctcggcctcggcggcggcgcggcggaggcccacgagcgcgccggacgtggcgccggcgaggtagctgacgccggtgtagaacgtgaggttctcgccccaggtgcgggtctgccggaacttgtcctcctcgaagaggcactccggcgaggtgggcaggtcgtagagcgcgcggtacgaggtggggaaggcgaggccctcggggcgatccggcgagtagaagcggcgcccttccgtgggctcctgctgggcgtcaacggcgcgggacatggctggctgatctagggttgccgtgggctgctgctgccgctgcgtgccttctgggtttctggacgatcggttttggttgccgccgccgtgtgccgggggtttaagagaggggagtggtctccgatctgcagtctgcgccttcgccgtgtcgccgaagaaaagggggagggcggagccgtgcgagatgcggactcgaaacccagtaggaaaaggaaccacaacgcgacgccacggttccgacttccgattgagaaaagagggtgtgggccggtgaggtgggccgtgggtgtcggccttcaagtaagtggtctgccagcgcggcctccctccgcctcctctcggcctccacacaactgtgcacgcaaggggctaggcggaataagtccagtaggactccctcaaaatataagtccagtttatttgaattccttaatcgcaaagatatttgaaactggctccgtcgtggaataagagaacatagtatttgcaaacgaaaaacagtttgtgaataaaatttttatacacgtgtttttagcgatctaaaagtaaagactgaaaaataaacttcgatgaaaaaaaacccaaaaatcaactccaaattgagagttgaaaatttaaattttggctgataagcataagcaaaagaaaaagatgaggctgtggtgtaatttgacttcatagattattgtaagagtggttttcgctgaggtggcaggttaacttgtctgctttcggccagctattgggcccgccaccgcgtcccctttctcaaatgggctcgactttataacaggccgggccgtgcaagcgccacgtagctgcacaaacaaggccgtatcgcgtcgtgtcaagctcgatctagagttgcaagacccccaaacccccgtgacctctccgccgcagccgcaacagcaatggaggcgcaggcggacgccggcggcgacgacctcgccgccatgcgggagcagtgccggagcctggaggaggccatcggcttccgccgggagacgcagatgggcctcgtcgcatcgctccagcgcctcgtccccgacctcgtcccctccctcgaccgctcgctccgcatcatcgccgccttcaacgaccgccccttcgtccccaccccgaaccccgacggcggccacggtaagagccccgccgccctcaagccccaccaccgccgcgccctccctgacccggcgcgctccacccgccgcaagacctcgcccggatcctcccctgcctccgtcgccgctgcccccggcggcctcgacgccgtgcgcaccatggtcgccgtgtgcctcctggagctcgtccccttcgccgagatcgacgccgccgcgctcgcccgccgcctgcaggcggagagctcatccgccagcgaggccgagcggactgctctcgctgacctagccgccgaactcggcggctcggcggcctccgctgtagtcctcgccctccgccgcatagccgaggacaccggcggtgtgcagatcgaggaggccatgattgggggcaagtcgatgacgatggtctgggccatcgaccggaacaagctcctcaaggagctgccagaatccgctactttgccgctactccaacctcctccagccccccagatgcccccctctgagaccgatgccggcagcgcaatgataccaagaacaccgcagcagcagcagccgcagccggatatgtggccgcattcgatgcctccgatattcccacggccaaggggcatgacgatgcaggggatgcagagggtgcccggcgtgccaccagggttgatgccgctgcagcggccattcatgggaccagctggagttatcacaatgggtgggggtgtggggcctagccctaaccagcagaagcagaagagcgaggaggacgaacttaaggatcttgagttgctgctgaacaaaaagacatatagagagaagcagaacaccaagaccggggaggaacttttagatctcattcaccggcccacggcgaaggagacggctgtggcagcgaaggtctgttttcccttcacctatgctagtggttttgttgtttgcactgtgtagttagtgatgctttgggttgctgatttgttattgatgtagtctcacactgttagtcctgtagtagtaaatgagctggcagtggcggacctaggatttgaacccagggtaggcctagcaaaaaaaaaaatctgaatgcaatacaatatgattcgatataaaatgtggtaaacgatacggtatataactctaaatggttcaatacaagtagaaaataacaaataagtttgaatcttacctaaatggtccaaagttggcatggaccttttagaatgtaccctcttctagccgcatcttgatcgttggcatcaaaacttgaaatagaagcccttaagcctggatcatgttcaatatcatcaacatcataaagcagcggcggttcttcttcagtttcaattgacccctgttgagttatgtgtcttagtgaatatgtatatgtttagggactaaatgtaaagaccattgcatacaaggagatgggggacaccaggtccaaatcatccaaaatttacagcatggtatcagagcaggacgatcctgcttgattttcttgcaatccctagcaacacgagttaatgtggaatgctggtttgcagactgcagtgaatcatggtccagaggtagtcctgaagagatgaggttgatccatgtttttttttggtgattagttgcatctggtttgctgcctgctgtctgtaagagtacggtatgttttttgccaaggaaatccatccaagccttgccttgtgatttcgctcctggacttgcattttcttcgttgctgtctcagcctctcaggtggcgttgctgctgttttctttgccgtgtgtgctgtcgagagttgcagcagacctgtgtagttgtgtgaccttgtataagttcagtcttgataaatctatatagaagtttgtgttttgattgggttccaacctgctcactaagaaatgagtgagccaactacagcaggggcggctgggcgctggcggcgtcgggcaggacgccgggaccgcgggagccgggagctcgggaggccgctgggcaacggccggacgtgagacggagagggcgcggccagccggccaggggcagagtcgcggagatggcgcggccgcgggggcgccggcgcggcgcgcgaaggcagcggcgttgccgccacggatgggcgtgcgcctggcgtgagccgggaggccgccgaccgacggacgcggcgggaggagcggcggcgtgagtagcggcctcaccggacggtgggagcgccggagttgcgccggcctcgcggctcgagggagcgctgtcgccgttggtcggtcgggaggggagagtgcacaggagagaacagagaagagacttagggttttttttgtttgttgggccaggcttttttcatgggccaagaaaaaataaatacctgatcttctctaggccaaattctagggtagtcctgggcctacctggactaccctctgggcccgcccctgtgagctggtctacttatgcattgctgttgttaaaactatcataggacgcataacagctagttgtcggaggcacactgctataatgaacggtttatcataaattgcttagattctgcactgaattagtgcgactgtcaaagtaaaactgttaaatgttgtttgacccatctgcattgcctatatattgtcaacctctcgacacttataacttccactcttccagttcttacacatttaattgtaataatatggttgacatgaaaatcattcatcttgttttgttaatatggttttatgttcatgcagtttaaaacaaaaggtggttcccagctgaaggaatattgtaccaacttaactaaagaagattgccgacgccaaagtggatcttttgttgcctgtgataaggtctgtggtgatagtgtcctgcaccccttttcacaatgtgtacttccgcacgttacattttgtctacttttaacaacagtagagcaaaacctgttgtgtttgattcaatcacttaaaatgatgtgcctatccacaatcatggcctctttgacgatgaaattatcctgttaacatattaggccttatttctggttacttgaatttattccaatcaaaatcttcacatttttttccttgaatacttgaatagcttttgttatctggtcttttagctgttcatggtaacaactaatctggaagtaactgtttatatttcattctgagcaggtccatttccgccgtattattgctcctcatactgatacaaacctaggagattgttcttttctcgacacttgccgtcacacaaaggtgactatggcatatacacccttgtattttcctctattatgatgtgtgtttttgtatcttacatatatcctataatctgtagacctgcaagtatgtccactacgagcttgaccaaacaccagatatacctccaatgatggctggtgctcttgcacccccaaggcaaataaggctccagagagctgaatattgttcagaagtagagcttggagaagctcaatggataaactgtgacatccgaaacttcagaatggatatcttaggacagtttggagtaattatggccgatcccccttgggatattcatatggaattgccatatggcacaatggctgatgatgaaatgaggacccttaatgtccctgctttacaaactgatggattaattttcttatgggtcactggtcgtgcaatggaacttggtcgggagtggtaagtttccagaactatatttgattagttgtcttcagcagtaccaacaggttaattaataattgcgtagcattttagcattgttcatatcctaatgccccttactgagtgcagatcatttagatatcccacacttcatactcaaataactcgataggatatagatgctactgtaataacaagttatgtcatattcattcctttactgaattttgtttttacttaatgtctactgccaagtgtaaactttccctgaatgaactttcagcctgaacaattttcttactgacaactatgttgcttgtttttaccattcttcagtttggagctctggggttacaaacgtgtggaggaaattatttgggtgaagaccaatcaacttcaacgtattattcgaactggacgcactggtcattggttgaatcatagtaaagagcattgccttgttggaataaaaggaaaccctttagtcaacaggaacattgacactgatgttattgttgctgaagtccgtgaaacaagcagaaaacctgatgaggtacactcgcttctttgattcatggttctatactcgccgcaaaagcattgtgttttttcttataaaaaaattctaactatagtttataatgtttttcttccctactgtaataataaacatgctcatttcaaggctatactcctacattctttaaatttgttttgctgtgcagatgtaccccatgctagaaagaataagcccaaggacaaggaagctggaactgtttgcaagaatgcataatgcacatgctgggtatgctcctgctgtgtattcttcttcccctagattattttgtcctcaaactagatgctaaccatttacgtaccatttaccctttttctttgtttgctcagatggctttctctgggtaaccagttaaatggagtaaggcttgttgatgaagggttgagagcacggtacaaggctgcctatcctgattcagaggtgcagccaccatcaccgcccagagcaagcgcccctatagatggtgatcaaggcacatcacagaaacctactgtatcagacggcgagaggcctgcctgatgtgaagcagtcggcaccttactttgaggactatgacattgaggaatcatcgtgcaagaatacaaacactttggacgacataagtattttatcactcgtcagctttaactccggttgtaaaattagttaagtcggtttacttagaagttactccagttgtaaaattagtaagtcgattgtttttggtcgcttgaggaatgcaggaggagggaagaattgttgggttttgtaatgttggcagacatccatcttgataatggaacgcgtgagccattactgatcttgttaacatgtcagcacgggcaaatcctgaatgcaacatttgttcccgtcctggaaaaacagcatgtacgttaactcatgctgggatggctaattagcgcaagtgcatcgccacacttttctttagtattttccgacgaaactttttaactcaaatactacaactttttaactccagagcaacattacagtacacaaggtttttctaaaaggttgacataattagagtacaaaactttaacgacagtatcatgtttgctgctaagaatggatttcaggttgacataattagagcacaaaactttaacgaaagtactgcttcatgtttgccgctaagaatgtatttcttgcgtgattcatgaccagtgactatgttaacatgactagagtagagaataagctcaaggcgctgctagatttgatgcttggtcgctcaaggcgctgccaagctgatgcttggtcaggcctcatcctcatcctcggggccttccttcagcgccttgatgaatgcgtccagagattactaacaagaacaataatatattgtttagggtgttaatgaagtatttacctaatgaatcaattatatgttgttcttgatgaaaaaaaaaactagcctcgatgaaaagttgcaaagatcagcgctgaattcatcaatgttcatctcatcaatgataggcattttatcaagcgttgacaaaatgacagtcaaaccttctttcttgtaagaaagtacacatgttagaacacggttggatcaaaggtaactctcaattcctatatttcttctttcttgtaagaaagtacacatcttggaacacgattggatcaaagataactctcaattcctatgtttacttagcatcatgaaacaccggtggaagaccggtgacatatagatcttataagaactcatccctttcaccttgcacgaaagtgcacttataaactttccattttagacaacaccttattgagagctgtcgtaacctttctaatcacaacatacccaaatcaaaacatgcacggcagaaggcttgagagcctttgtaatgtgccataaggtacatgactaaatgaattaaagtggcgggaattaaataaaatcttatttcagcccattactttcgtaactggcccgtcctgtttagcgtgagcgtggcctgtctaccggcaatgacccgacgcagggcgaactaagcgtggcccagttgtattctgcggcccaaagaccacgaggcccaatagcggtggtggccctacgtggggctgatatggtccatccgatttgatggacggctcggatcagtcccgtgccgatgaaatcgccggtcggaggggggaggggttcgaaaaccctaaccctaatcccccttctcccctactctcctgatccaatctctggtgatgcgagagagtggacaacgacgatggtggtgacgacagtccgtcgaggtggagcacgcacgcagcagcgatagcgagtggcaccggcttcaccggctgggaggcgtgcctgagggcagcgccaagccaagccacagcgtcaacagtccaatgaagcgggcgcgcaagtagaaacgggtgccgagataggctgggcttcgacggcggggggtgggggcatagtaaaaaaagccggactggtaagtgacccggccgacctctcggttcagcggtctgccggtctgaccggtgacccgggcggtcgaactgcggttcacaaactacatgtatattacatattcactcatgtaatggctagctctttgctcttgtaactcttggacccgggttcgaatcccatgtagtgcaccatttcttgctatttttgccaaaaaaaagaccaccagctgcaccaaatgggcctttaaacagcccattgtggcccattagtatggctagccggttcaaccagtgccggtttagtgtccggttcgccgaaaaccggccggttcaggcgggcaaaaataagaccaacagctgcaccaaatgggcctttaaacatcccattgtggtccattagtatggctagccggttcaaccagtgccggtttagtgtccggttcgccgaaaaccggccggttcaggcggttcagagcggttcgattgcatgtctggtctttaaaggaaaccgaaccgtggtcacctttggttctggttttttccgatctaaccgccaggaactcctagaaggcgcgcaaacggggagcccaacgcaaccgcgaggaggcgaaggtgcatgtccggtttttaaaggaaactgaaccgtggtcacctctggttctggttttttctggtctaatcgccaggaactcctagaaggcgcgcacacgggaagcccaatgcgaccacgaggaggcgaaggtgtggcagtgtcgcttcccggtgagacccacacaacggtggggtttcccggtagaattagggctccaaatccggtaagaatatgaactcaagcctaattttcttaatttgatttggatttggatttgattcagattttggggtactcttcaatttggggatttcgggaaaattgaaaccagatgggattgtcaggtgctattgggctgcaccttgggccgtgccagctattctccaagttgagcccaagtaagcccaaggagaggggacatatacaaaggcaacggcgacacttgggagggaaggaacataactagcaatcggcggcttcggctacagcagcggcaacgacttggttcggttgaaccttgttgatctctattcctctcccaccctctctcttgttactcttcactaatacttctagaagcttccggaatctagtagcttgcatcctttacatcttctcatcctgtccctattgtattttcctgagattgcattgaattttagttgctcttgagattattgagttgagaagaagaggttgctaacactcctcttctacgcccatgctgctttctcccatcggtcgagcaccctggaaagatatgggggaagagagtggagagggagcaaagggaagtagaagatgtggttacactgatatgtgggatccatctgttcttttttaatttttgtctttggtgccacgtccccatcatgtcatgtaaaatgcttacaatactgatttgggactagggatgacaatttcccccgcggggccgggtcccctgcggggacccgaccctacgggggcaggggccatttctgacccgtgggtgagtcgggggcagggcaccgcatttgggcggggagcggacggagaggatattgaacccgggggatatattacccctcgaaatgtagcccatagaaggcccaacaagcccaacttagcaaaatactgtgatatatgagcaaaaactaaacatgctaaccctaccttatcctctcccgtccatcccatgcagccacacaggcacggaggtggcacactcctctcgcctcgcttttcccttctagatctcgccgctctctctccgtctcttgcggtctcgccgtcgtcagtcgccctcttccctcccctccgacctcctgtcctctccagtctcccctttccctcccatctccccacggtagcgcgcaggacgacgcacgggcggcacgcggggaggcgcacaggcgggcgtggcgagggatgcggcacggcgcataggcgcgacggctggcaaggggacaggcgcggcgagcgggcgacacaggtgacaggcgaggtgaaacacaccgagaggtatttcactaaattggtgaaatgttgtttgtttattgagtgaattgttgtgtcaaagtatttgtgaactttgtggtcatgcatgcattcagatcatggacggaacgatgtatcatggaaatatttgtgttcttgcttgattctatatgatagtcttgaaaaaaaaaatttctgattggatgaaaatactacccaatacggggccctggtcgggttgtgggccggggggtgtcgggggcggggcttaatttgcccccgcatctccactcgtgccaggatcggggacggggccgttctagtctaacccgtccctgccccgccccgttgccatgtctatttgggactatatttctacggttattgcggcattgggatgtaattcgaacggcgtcaagttgagcgaccttgagtgaacttattccttctcaaaattggggagcttgcgactctggccattctgctcacgcagtcacgctaggcccaaggcccaaaaacactatccagtgggctcaaactagaggcttctcttctacccagggtttagcgtcggatccagtctccaccggagcgcggggcggcggattccaaggcggcgatggagttctgcccggggtgcgggatgctgctgcagatccagccggccaccggcgggaaccgcctgcgcttctactgccccacctgcccctacgtctgccccgtcaaaaacaaggcacgcctcttcttagctctctccccccctatcacttcgcctccctacttcgtctgcgactttgcgtattgctgccgcggcctccgcgtttgattgatgcctttcgcagatcgtgaagaaggcgagactagtgaagaaggaggtggagcccatcttcagcgacagcgacgccatgaagaatgcccctaagaccaccagtgagcccttcgcccttaactttcttgttaagacaatacattgggattaattgttgtcttaactttttttgttgagacaattcgttgggaataattgaacttagcttctccattatactgtgtatcatctgtatgtcatgaattgttgattatcttgccatttaaatttaggtgaaaaatcattgctattgccacaccaatgggaaattttgttctaaatgtacttgctgatttttgtactagtaattgtttttttttcttttcttccatccattgaaatgtatagctgggtaatctagccgcagtccaacataaacgaaagtgttttatgcacatattctgtcttctgagtttgtttagcttatgtcgatacaggagacatgattgcttgttcataaaaaaaaaaaagagatgaaaaatatactaaaataaaaggctcaaatttacttcacagccaagcagtgctggtttgaagcataataaattaatatacttcttaagctatgataaaatccaaatagcaccagatttcgtccaagtaccttcaagaaacttgctactcctatgtatttcgttgtttaaagtcatcattgagatgggaatgttcattaggggatgtctggcacatatttattaggaaaccagatgattgaatagttatgggtgcttctagttttgatacattgttaccatggccgtggtatactatcatgcatgtgcgtgcttagttccttgtaaaaaaaaggagtaaaatggtggaccatcagtgctttcttttttcaagcatctattctgtacactttcaacacaagataagattgcttgttgtgttgacagaataagcttgtatcttttgatagtggaaggacaaaaaaaaagcatttttcaaagctgtacctgaatttatttagctgttctgattataatggcatgtctccaacccaacgcaaataagttcaatattttaacaatttccacgtaaagaaccctgacctaacatatggttaaacattttaataaagttctaatggttgtctgaattagtgaccctagaggtgacattctgccatacataatcctaaatacattcaatgattttgattttcagctacatgcccaaggtgccaaaatggagaagcatactacaggcagatgcagattcgatcagctgatgagccaatgtctacattttacaagtgttgcagagaagaatgccaatttgattggagggaggactgactttagtaatatttcttgtttaatgtgtgtggatatttttcctgctaaaactatgtaatcatatgaaaccttttgtaatcagctcatgccgcagcaaagagccaaagaaaacttacacatgggaaaccaacgtaccacaaaatatcgtgatattttggtctaggcgtgtgccaaagtcccaacctatcgtggtgttttgtctaagaatccgaactgaagactggtccattaaggcattaacccaaaaaagaaaaggcttctcacaccctcagaagttagattttggtctttgttgccttgttggtgttagagatgtagattgtcctggtctagaacacgagagcatgaataaacgagaagattgcggccataaggcctcccgctctgccgaatgatctacttaggttatcatcaacaacagcattttgcagcaattacggcatcaaacattcattaacaccatcaaaatatcatgctgtaaactcttgccaaacggcttaataattaccaacaagctggctttacagcattgcagactacagcaacgtttaaactaaaaattattaacgttgctcaattatgtatgaaacacaagaaatgttgaaccaggaagctggaacatgaacatctgaacattctttcttatgatgttcagatgaaacacaaaacttgactttatacatcatcatttatctggtaaccacttcttccgggctccttccaaagcttcttcccgcatccttgttaattcacgaaaccattgctcgtactgagcttcaatcagaccaagctctccatttaacacatctcgattttcagtaattgaaaccgatgcaccgatcaccaactccgagtgatgtgatgcttgatccatctgaaagattgcaaaattacttgaaccattacttaacggatgtctgcagcccagtttatcggttcctttgtacgcaccacattccagtgtcctgtattcgtcaacgccatactcactaagacttttggaactcccatcaagctgaacagaaatgtctgacccttcagagctatttggtcctcctagattggttgcattcaagagagaatcaatataatcacttggtgatgcattggcttctttcgaatgcatcataccttcaactagtacataatcatgtgtcaactccgatggatgctgctgggaagtaattacgtgctcactttcacccattttagattcgctggaagtactcattactgcatcattcatcagctgctgaccagggacaagattcactatcaaaagatcaataaaatcagcaatgaaagtaacatcacagtctgctaactccaactgctcgaccatttcagcagcaacagacatagctgtatcagaatccaagtagaagagaaaatgaatgttccttgcatgtcctgcaaaaataaaaatgatatcgtatcacgagaacacaaaagataaattcaattaacaatagaaagtcgtaccacacaaatcggcaattcgcaaaaccagtgatactgaattgtcatcaagtttctcgcctgttagctttagctctgtgtttttgttagttcgcgtgaactccaacacagatctatgtggaccaccaagatcatttctcttgcatgtgctagtacacatagattcattggtgtcaacatccatgtgcaaagcttccaaagagacatctactgatttgggtaatgatgacggaaacttagtgccaacaagaacactagaattatcagagcaaagaaaggggtcttgcaatagttctttggcagacagcctttcagaagcaggaactaaacatttatcaataaattgttttgcctgaatatttgtgattttagccagagcagccggcttgacaccctagaaatcagagatttagataagatagtgttgaggcacaattatacaaagataaattaataaatacttaccttagatactttcttaaaaatttgagctgcatttgtacattcactgtaaggatactcaagagtgaacatctccaacatacacattccaaatgagtatatatcaacaagttcatcataattctcatcatatagctcaggcgccatgaattcaggagtacctgcagaaagtggacccatatcacagggatgtatcaggagaatgcagaatgttttctgtggattaatttggcacctgctaacatgcttagatgagaaaaacaggtgactctcacagttttgtattgtggacctatttacattagtttatgtttttaagtgacatggttggtgcatcgaactcaattcagacatagctgaatattgtaaaaggaatgtaaaatatgaaatgagcagcataggatcaacatgtaagatgtaactataagaatattgtttaaagggttataaatgtggtataagcaagtcaattttgagttaatggaatattgaaaccccaagtatatcggtcacaatacttgtgtgtgtaacacatcagatataaatgttgacaagtcagatcagtaatggctaattagctatagaagtggttgacattgcccatggattatgcatttagttgcacactcaaaatcgtcatttagtctgtctctccaaatcagaggacaataattcagaaataacattggaatcacaaagtagcagaaggttattaccaataacactttttgctctaggcgttagcatcaccgtggctaatccaagatctccaatcttaacttctccatgattcccattgacaaaaatgttgtcacacttcaggtctctgtggataattggaggttggtgggtgtgcaggtaatccagcccacggagtacctgtctagcccaattctttattgccttcaagtcaacacgtggatgtttctgacgatacctataagcaaaaggtaatggtgtcattccacaagaaacatggtagtattaagaaggcaagactattacttagttgctacttactgcctgagacttccagatgtgaaaagttctgtaataacattaattgtcttcttttgatcatcaacccaataattatagaacttcattacgttttcatgcttgagagactttagtagatgaacttcagagtatagccgttcaagattatctggagattgcataacctcatctatctccacttggctccatgcaacctcaatgccttcaacctcatcaaatgccttgtaactatatccgaattaagcatggatgcaaatagttacaaacagcccgatgtaaacaagagcacagacagaaaatgagcaaggtagcattaatacatttgcagctattgccattagaaatgtataccctggatcccattcgatgtttgttctgtaacagtgttgaccgtactagacaccagcaggcagcaaattaaagagattaacctccacgtaaaccattaaacctaaatcccacagcaattagtaggcctaaaagttgaaacagataaaactccttaggtggtcgttagtttgttgcttaggccctgtttctttcagcttaagattattataatctagattattgagtcagattactataagctagattgttataatctgtagtagaataagcggttagttgtttctttcctagattattaaagcctagattattgggtttgcaagtctaaagagggagtgggatggcatggtgggtaatttttcacccaataatctggaaaaagctcacataaatgagcttatcagattataataagctggactccagattataataagctatttcaataagttgtctgtttcttttagcttactcccaataatctggattataacccaagctgaaagaaacagggccttagtatttcttacctcttaggacgatatttggcatagatatataggtgctaaaaggctgccaagacatgagacgattgctagaatactagtagtccttaagttgaaagtttggaacctgaaattctctaatttgaacgctgtttactaccctgcttggcttcttgtgttagccgaaacatagttgcatatatggttaatgcagcattttttcctagattttgaaaatgtgacaacccattgcaatataaatatatctctttgacaaagaagcacaaaaacaaagaagagattccaaggacatacacagtcttcatagctcctctccctagcacctcattgtactgcaccagggaaaaagttcagatgaatacagcaggcagagttcaggagtggcacatttgtggataattttgacaaaattgcatgcagtttttttttccttttggtaatcgtttgagcaaatttccagcattttagtaatgcatttcaaacatattaaattctatgagcaagcaaaatttagataagcctttctgtaccagtaaactagaagcctgaaaattttaatgcaggtatccgttcatcacaaacttaaatagactagcatgggcatgtcaaatcacgttcacatcagatcaactaaaatggaagaggttcctatcagaaaataaatgagaaaaaaacttacgcgtatgtaccgcctggtcggatccacctccacgcactcagcatcgtccaccttatccagatcgccgaacacctccatttcagatcaccccacgcgcacgaacgaatcaggaagcagagaggaagcagagcgagatgagccaggcgagatcgccgggacagcgcgtggagcggcgcgggcgcccgctacgcacggcggtcagcagctagagccggcgaccgatgcagcggaggagagacggcgcggggcggccagttaattatataggatcgccgggcgttcggtgaagggctcggagaacggggccggcgacggcagctcgcggcggcggcggctgctgcggagcgacgtcgccttcaccccacccgcaactcccatggcccggcacccggcggacgccacgcggctggcgcagcacctcattcttctcccccggtcggtctcctcccttcgtcgtcggcggcgcgggcggatcccatggagggctacgcgaacggggacgcgggggcggcggccatggaggagaggcggaggcaagggctagggttaggaattcagcggcgcgccggtgtacggatgcggggaggaggcgaggaggaataagaggggagaggtaggtggtggtggggagcaaaaggtgggagagaaatagtaaaggcctggagcctttattacggttcgggagcagcagctgcatctgtgaactgggatgacgctcatattactccgtcacacaatgttagcattttttatatggaaacggtatttaaaaaacaggtaaaatgattggaaaaatattataattggttggagaaaaaaatagataaaaaattaaatagaaaatgattgtgattggttgagagaaaatgttagatagagaaatagcaacattttagaataagatattgtgttaaagttaataacattttgaaatagaggtagtactcccttcataaaaaaattgtactccatctcatattagatttatttttttatgcaatgcaggaagtacgagcgattttggattgataccaaaatgtgtcctaccaatttattggtatcttgaatagtaatagtatggatttggattgaagccaaattattgataatgccaatgatcaatttgtcactaatctagaaccttcttctttatatcatcaatatttgacatcatattggtagtaatccaaacatgtataataaatttctatcctaccaaaaaaattggtagtaccaaaacatgtcaagaatttggtattaccaatgatttggtaaggtagagaacaaaacaacccctacatggtacgcaaactcatatatactgataaacggtgatacagttaatacgcatgagcgaaaatccatttttaccaggcttgccgttctttttttttcagttgagaataggatgaaaatttctggattattgtgaaaaatcaaaatgactgccaaatacaaagtgaatacttattcattggttgggtctagataagttcaaccgaaaaagtttgatgccaaattattcctcatgagaatctattaactttcggcctcttgcttttttaaggagattcggagagagaggaaggatgcttacagcctagattaggcattctatacattctttttttttagaccatattatctacgtgtacaacatgttacttgtcatataaacgtgaaaatacatacaagaatgcttgtgctaggcgtcgaaaccatcaagaaaaattaggcaggagcaaaacatccacccgcccacaagccaatcccttttctgtctctttttcccatttccttctccttccccttttacctctccttgagctagtggtggttgtcgatctggttgacaagggaaaacgagcatccgttgttggtaacttgggacatggcgaccacatgtttcctcaaggcgtcagtattgttgaagttgtgtccatcagggaggtgacaatgaattcgagataggtgaagaggatatgtgaacatattgccggccaaagttataggctgatagcacatcccatccagttcatctccacaagcgatggctacatttggtcctccatgttgtgcattttctaagtgcagtttcccatgaagccatagagtgcttggagttggaggtgccaaggtagactgtaacaccctgaaaattcaagacaataaaaatcactaaaattttaaactttttaaaatttttacatcatgctggatgttatggttgcttttgcttgccaaactataaattgtcataatggaaaattaaactaaagttatacaactaagtaataattataataataagatatttattatgaaccctataaatatttacgtacaagaaaacaaagccagaaaaagggaaggttaattactaatttaatttatgaatcaaatattaaatacttgaaccatgtgatgcgtgccatgaaatataaacacttaggaaatgataatcgttcaaataaatggaactctatctatagaatagttttactgggaaaaattaattagatattatataatttgaattgaatcataaatgctaaattatagaaatccatgtggtggtaaaaccaatccaagaagataaaccaatatgcgtgaaaacagataaataccaaaatcccaaatataggaaattatagaatctttaataaaccttaaatattggacaatattaaattttgggcaaattcacattgaacacttaatacggtcacccaaatgcttaggagtaaatacaaaattaatttgcaacttttctcaatttatatatcaaccagagccgtaaaagtaagaaaataggaaaactaaggaaaatatataataataataaggatatgttcaatattaaatttgaatataaatttcgatggaataacttagattttgtgtgaaacacattgttaggtggcaatagtccattttctaaattagaaaaacatctaataaaatccaaataaatcaactagcactgttcattgccccctaggtgctcgaccctgtcccatcaccgccctccccctgcccgcgccgcgcctagccctgccctgccctgcctgtcgcgcctagccctgccgcgccgctgccttgtgccccgcgccgccgcacgatatcgtgtcgccgtcgccgtcgctcagacgtgccgtgcgccgttgcttcgctctgcgcgcgccactgccgcgccccctcgcgtcccatcgtgccgcgcgccgtcgccgtctccggtcgtgtcgcctcgagccccacccctccgctcgtcacgtcgccatcgccatcacgtcgtcatcatcaccgcgccgcgtgccgtcgccatcgccgtcccgtcgactccactgccgcgccgcgcgccgtcctgtcgccgcaccgcgctctatcgcgacgccgtcgcccttgagccccgcgccgctgctgcgccatcgcgtcaccgccgtcgccatcaccacctcgagccccgcccgcgccgcgcactgtcgccgtcgcgctcgccatcccaacgccgcgccgcgccgtcccgtcactgcgtgtcgccatcgccccgagccccgcgccgccgtgccatcccgtcgacgtttaaagccggccacccctcccccgagccctataaataccccctcctttcccttccctccccacgccattcccccctcttctcccctttttcctctttcttcccctccaccgacgccgcattccgccgccgctgccatgccccggcgtctcgccgccgccgcgccgcaccccgccgccgttgccgccggtccgataagccctcccgcctcccttcatcgccggtagccgcgccgcgccgctcggccgtgagagagagagaggagaaaacagagaaagcagagagagagaaaatagaatagagaagagaggttagagtgggcccccacgtgattagtaaatagtaatccccttaatctttattagttaagtctattacatgtaggtccgggtggttaaaaatctagttatggagagtttatagtttcgagtctatgacaagcgggccctactaggtttaatggccggtttgaccctagtcaaaggagtcgggcccacctgtcatttgcccatatggattcctttagaaagaaaagtaaaataaaagaaaagaaaataggaagaccccacctgtcagtcactatagcttgtggataaggttgtattataaataaatgaattaggaacagtaccatttcgcaattattagaattaattcaaatttgaatctttacactagcataacttattcattttagctccgatttgagtgaaacttgaacctaaattcatctaaattcataagctttccaatggtatataattcactatttgataaaatatatttataattattaaataattaatatcaagatgatgcataataattaacttaaaaatgtgctaataaataaaattgatattgtactgtgaagtagatgtcaaataattgtctttaacacgctttctcactataaaacctatgtaaactaattaggagcattgtttcaaattaattaaagcataggaaatactagtgccatttattaatatatgtcaatatataattatactcatgacgtccaaattgtataaataatgtttagcctcatactttgtgactaaaagttgaacacacgtagatgagtctttaacttgtttatgagagataataacagagctagtgtgactaaaatcacccgcacgaaattaattaacggcatttcctatacagtagtatatgtttaggttggaaatcgacccttaagttgtatagacggtaattcactcataaatccacttaaaatcacatgtattgtgtagctcgtagtaaatagtaactattcaaataaatgatttaatattaagatattgtgcacacacctatactgtacatcccattatagctatacggtatagtattaatttgcttgttgcatatattaaattagagggactatatgataaacatgaatattagacaaatactagttataaatcttgatctcatataattatagttcaattgtaaattaggattattcattgtaaaattatgtgatgggataatctgtaaccataatatgattatcctaaacaactctaacatacaaagcatggataattattaaccttttctaatttattgtgacaagtaaaatattttcataattaaagcaaagcctccatcaataaaataataatacaaatggttccctgcgattaattgcttgatcccaaatccatccgacgacaacagaacctctagtatatgaccattttatttagatcaatgcatgtgtagccataatccttccatagccattagctagactaaaccacatattagccagatatgtatctcgtttatactacgttggctagctcctaaatagaccaccatgacaacagaaagattaagaaactttagcccttagcatgttggaatccatcagcaagcgcgaataatatgagcaaccctaggttcgacctcatcaaatatattttgtttgtgcatatttgattgttgcttgaatattggtttttcttgcgtattatagaaattgtgtatcgatcagtcgtaaggcaacgtctacaacttccaggaggtgaaggttgaacaataattatatcaagaataaggactatcatgcgcaggaaagtcatcactattccttgaacatgttgatcccaattgcgaaattattttgtttacaaataaaattgcatgcaatgaggaacatcctacttgtgattatgccatgccttgattattgtttacccccttattccttcgtaaccatgtttacgtatgagtccctagtcaattatgacaattgcttagaaatgctattctagaatcatgcatactcatatttatcaaatgctatatgcttgggcaattacctttgggaaggtaattgagatgcggcatgtggagacatgagcgccatattgccatgatgttgatgacatgatttgtggaaggagaaataaaactaaacaactgttttcgactggggcggacggaggatttgggtggtatctggaaaaggctagtaccgtccccggtcaattaaggaccgagccatgaagttaagcatgaaacgacccccgtacaaccgtacttctcgaatgggtatagacctagcggattagatagccgagcggaggcagtatccctgcatagatggttcacccctgagtgaggcaggtgcgctaccgtgggacaaccgttgaggtagggccgagaggcgtgccctacatcggtgtcgccattggtaggactgccatgagtgtgtgagagagataacttaacttgaatcttaatttaatatgtgtatgagacttccctttcccgggagcgccagaactcctctcactgctagaaacatggacacttagagtgcatgaggatttaagttcatggagcgggtactgccaatgcgaggttatcgaaaagctttgtcgtgacgcgtctcatgtgttgggacgaggctcatgtgttggacaattgcggagtgcgagtaaagtgtacatccactgcagtgtgagtaaaccaaatctattcgaatagccgtgctcgcggttattgagcaccgggacatgtattatacttggctagactctagattcttaacttgtgtgggatgggatattgcatgatgatttttatgctgatggagccacttcctgagaggagggaaggtggacgtcctcagaaaaccatgacgactcaatggcgggaagctatccttgggatcacaatggatggtggacagaaccatcgttgtttaatgtgaacattggtactaaaatttgatcagtctatgctagattttaggcttctgaaaagaattgcaaaacttgctttgcgcaaaagaaccgtggctattccttaaaataccccctctatcatatgcattattgttgtggtggcttgctgagtacggtcggtactcactcttgctatttatacatcttttaagagagtgttgaagagaagcccttgtcggtacgcttgcgtatccaacaagatgatcggagtgcggtctggttctaggtctcgttccccagtcgactgcctgtggcatattaaccgggcccttatattatttggtcttccactgctgttctctgatagttgatgggctacctggccctaatgtaagtatttaactcttttagcctgaattcattcgtgatatgttgtgattcaactatgtatgtgtgtaccaactactgattcagggattggtacagataaacacagaagatttccgatttacaaaatcggaggtctacatagacagagcaggagcttacgcaatcagcaccattggttagtgtagcctacgataggaggtgcgggctgtggttgatgacgggttcttctcaagtaatcatgattgctggtaatatagccgccgtggtggctatgcgggagaggaagacaaccaatcttgattggcgtgcttttttatttgacgtatcaacatttgaaattcaatgttttatgcacgaggagagaaatattccaattagaattggactatatttcacatttttatttttattatgaaaatattgtagcggttggaacttatgtgtcatactcatacatagaaatgagatgtttcaaattagtttggacaatggttcgaattttagtttgtttttttatgtttcgctccatttctcaagatgttttatctgtgtctctcttatgttactttattgcgtactagtttgtcatccatttattttaaaatgtcataattacttttttttcacaatgtataattaatgctacagttatggtcaactgaaataattacagtttagcctgatttttcataaaggcccccacattataggtgaaacacactgtatcattcttagattgactacgttctttttagcttatttatcgaattattaaaacaacttgtctattccacgtttcaaattaaaaatatgtttgcaagaaagtttcttctaccgtattttttagattaattgttttaaatatatgttaagtttattccttagaaatctaattaatcaacgaatgtgttgctagcaattacttcatccgtcccaaaaaaaaatcaacctagtactggatgtgacatatcctagtattacgaatctggacatacctctgtccagattcattataccagaatatgtcacatctaattctacattcgtttatttcaggatgaagggagtatgtaaattgtttccaaacaaatcggtgaccgaaatgacaacgacacaaactcgatctagaaagagcaaagactaaagagcgacagggacagatgatccattgataattattgtacatccgacgtgacgcgaggcggtaaccggaaaatgatatgtgatgcaactttggaataagttcaccttaggtccctcaatttgtcaccgagttctaaattcgtccctacatcacaaaaccgaatacaatgcatcccacagcttagaaaaccatgcaaatgaggtccctcgacagtattgtctccgattttggctaacgtacgcctacatggcactctattgactaggtcttaatcccacgtggcgcttacgtggcaattcgatccgaaaaaataataaaacccgtgagacccacgtcagctacacacataaaaaatgatggtacccatgtggcctcacatgtcatcctcactaccctcttctttgtatctatctttttcttttctttttcattcttttttcttcttttgcttcgcgtccggcgcttggtgggagcgccgtgccggcggagagggcggccgacgggagcgccgcgagggaggcggcgagctcgtcgggccggcagacaggagaggagcggcggcgctcgcaggccggcgggagggcgggagaggagcggcggtgcgcggggaccggtgggagggagcggcgtgcggaggccagcgggagaggatcagcggtgcacgctggctggagggtgggagggaggggagcggcggcccatgccacgccggcggagagggcggccgatgggagtgccgcgagggaggaggcgagatcgtcagggcggccgacaggaaaggagcggcggcgcgtgggagccggcgggagaggaggcaacgcgcagcggccgacgggagggagggagaggagcgacggcgctcgccggttagcaggagggaggtaggctcgccggcctctccgccctggttggcatgtctcccccctccccgcctgtccctcatttactttttagttttgctcatttattttttttcaggatttaactgtcacgtatgcgccacgtcaatgacacgtgggacgaagatctagttaaagaagccacataggtatcacgtcagttaaaccggggtcaatactactgagggatctcatttgcactggttttgtaagttggaggtaaccggttttccgtaccgagtatgaaaatcagactgcgcgacaaattgagggaccaatagtgaacttatcctgcaactttcagccaatttacggccttattgtctcaggcctaaccatcttcgtttcggaagaagaatctcggcctggaaaaggcccggtccaagaacgggaggcgagacggaccagcgacgcgtctgtgcgacggcatgtcctaaccgcgacgtgagcgcctttttgttgaccgtgcgtgcgaactgtcgcaagatcgcccgtgcatagacgccaatctccggatttgctgtcgtgaccgtgccatctgcggtgaggcggtgagcgacacaagcatttctctatcgtacacaccacgcctctccaggatgcctgcaagaccagtacaacatccaagcacaataagaacagcactcgcccagagaacacagcaaattaaaccaccgatatccgcttgatcgcaccacccatttttacacttttccgcgcgtgtacttacactgcctgcgaccgccgcgatcagacacatggactgcaccaaggcggagacacggaatgctccgaagtggcagatgacgatgccgccggcgggaggcgagtcgtcgtcgtcgtcgtcataaggtccggccgagcgtgcgcgggcacggctggtctactgcgcggccgcgctccaagccaaggtgtccggctccgctaagaaggtttggaagattggcacggacgatccccggaaggcgacgtacggcgtcaaggtgggcgtcgcgctcaccctggtctccctcttctactacgtcaggcccctctacgacggcgtccgcgggaacgccgtgtgggccatcatgacagtcgtgctcgtcttcgagtacaccgttggtaaaaaaaaactacaatttgcgtgcacaaagccacaaagtcgcaactcacgaccgtgcgacgcaccatttgattactgccttattgagtttggctttgcttgcttgcttgctatctttggtttgcacgtacgcgtgtaggtggtagcatgcacaaggggctcaaaagattcgcggggacgatgagcgcggccgcgctcgcgctggggatgcattgggtggcgagcaaatccggcgaaacgttggagccgttcgtcgccagtggctcggtcatcttgatgggtacgtgtccaacatcgtcatggccattggcgtagctagggggtagtcctggtgggctcgggactacccccgaatttggcccagggagccccacccccccaaaaattttagcccagacttaagcccaagaagccagcccaataagaaatgaaaaattagaaaggctagggtttggagttcgctgcaacccgacgctacttcgtttcgcacgcgtgtgacgaccgcccatgccgccgccgttcctcctttcccggcctcgccagctcgccttgccctcgcattggttccgcagctcccacctctcccctgtcgttctttgtccgccgaggcactgagccgctgccgtcgttgacctcccggctgctcaatccatggagaggcggactgacggaggttagtggcgccgtcacgccgctgaaccgccaagcgccgctggtcgccggcgccgggagcccaaggcccctggccggttggccctagttgattgccgctcctcccccttgccctgcctgtgccagcggctgccttagtagcctatgacgaggtgagtttaagtgctaactggtgaattgaagctatgagcctatgaaatcaaatagatgtatatttctaactgtgatttgtgcatcagttagttagtgaatgactgaatgtgtgacgttgacttgctatggaatgtgaattagtgaattagagctatgaactgtgatttgtgatagtgctaattggtgaattagaactatgaactgtgatttgtgaatcactgaatgtgctgttgacttgctgccattttattttagtttgtaggatttctttggcaaattaagtagtagttttgataaggttggttcgagaaattggaacaaatccgacgcacttgacaaacatgtagggttgtaacaagtaaacacaataaaaaagcttcagagaaattatttatgaaagatgcaccaattgctatatttctaattttgtatggccttttctctaaattttgatctgtatatgggatttacggtgattgaaaaattttagtatgtgatgtgaacttgtgatccatgaagtaggactacccaacaaaaatttcctggctacgccactggtcatggcaacatactactacgtatgttgcagctactgcagccaccttctcgcggtttataccgacggtgaacgcgcggttcgactacggcgtgtccatcttcgtcatgacgtacagcttcgtcgccgtgtcggggtaccgcgtcgacgacctggcggcgctggtgctggacaggatagccaccatcgccatcggcgtcatcatctgcctcgccgtctgcacgctcatctgcccggtgtgggccggccaggagctgggcctcctcaccgctcgcaacatggagaagctcgcgtccgccgtggaggcctgcgtcgaggactacttcgccgaccccacggcggcggcggccaggtcggaggggtacaagagcgtgctcggctccaaggcgtccgaggactcagcaggccgcgcgatgggaggcccccgcacgggcggttcggcttccgacacccgtacgaccagtacgccaaggtcggcgccgcgatgcgccagtgcgcgtgctgcgtcgaggcgctcatcagctgcgccggcgcgtcgtcgcgccagcgagccccgcccccgcgtctcctcggcgatgcgtgtacgagggttggcgcgtggtgcgcgcgggtgctcaaggaggcgtccgcctgcgtcgccacgatgacgacgtcccggggccttggcttcgccgtggcggagatggacgccgccgtgcgcgagctgcagagcgacctgcgggctctcccgcccatcctagccgaggaagcgtcggagacgtcgctggcagaggtcatcagcacttcaccgttgctctgctgctaagcgaggatcgagggcgtcgtccacgccgtcggcacgctggcgacactcgcggggttcaagccggccgacgatgctgacggtaccgataagccagaagccgaggtggcacgttcggacgagtcaccgcctcaccggaaaatctggcaaacacgcaccttgaacagagtgaacattttagcaagtgacaaaaaggggtacaagctgctagtaggtgtcaaagcagaacattttagcaggattccaatttcaaaaccgtggtgcagaggtgcagtgctgcaccagtacgtatctacatgttcaaacgttggtctctgcttctctgggccttagtgaagaactttcggcccaagccaaaccaggctttggtgagaaaatgtacagcccaagatcagatctggacttggacagaaatattaggcgggcctgatgctgatagcttccaggcagcactggtctttctattagcccggtgtctactctctacaacaatttcagtttctaaaaaggaataagttcacttcatgaccctcaaaagagacccgaatctaatccatggccctaaaccgcaaaaccggatatcttcacccccaaactattgaaacgtcagcaaaaccaccctccaaaaccaccaagggagtcaaattgcaccggtttcaatagtttgggggtgaagatatccggttttgcagtttagggtcatggattagattcgggtcacttttgagggtcatgaagtgaacttattccttctaaaaaatcttctaggatttttctgaataagtccactttgataccccttaactagtggcccaatctaattcatacccatgaactgtaataccagatatctcgatcccccaactattaaaactggtgcaatttgactctatcaacggttttaaaggatggtttcgctaatgtggcgctttgacttgttccaacctatggagtcacctgtggggcccacttgtcagtgacatttatctttcccctctcaccaccgctggtagggaggaaggcaggaagaggcaccgcaccatgccagtcttctcttctcttccgcttcagccacgcctatgccctcaagcaggcaagaagttgtcagtcattctatccgcttctcttcccctacctctcttggatctcggcaaaatcaggcacgcggcgacagcggaggggaggcggaggtgatggcgtggaatgagacgaagcagggtaaccactagggttgagagcaacagcggtggggaggcgaaggcgatggtgggagggatgcggggagggatgcgaggaggtggcatgggatgagacggagtggagtgcccgccggggcgttgctggcggagcaagtgtggcggctttccccacatggggttgaggacgacagcggaggggaggtagaggtggtggcgggagggacggtggtgtgacaatggcctcccttctcaccgctgccttcatcctcactcgtgcttcctcctcccttacagcggcgagcggaagggggaagagggggcggcggcgcgacgacgacctcccctcatcaccgccgtgttttgccggggaaagggaaggaagagaagaaagagtatgcgacactaacgtgcgggccccatagggtgacttagcggattggaccaagccaaagcgccaagtcagcgaaactgtcctctaaaatcgtcgagagagttaaattacatcggttttcacagttggggggggggggtgtttcaatctccagcgccaaatttgctatgagatttcatcgttcaagataaatagatggatctgttcctttggacgacattggttttatgcctttatccacagtatatcagcaaagaagatcctttgattataaaaatccaaaaaaataaaggttttatgtatacctaagcatgatttcagccatgggaagcttgatcaaatctgcaaggaaatcatttctggtttacccatgggagctgaactaccgttggcccgttgcaatcatctgaaggataagctagatcatatgtcattcggaagcttccactgatcgaagaacgagatacatcactatgacggccaagggacaattatctcctacgaataagacctgcaaaccttttgcagacgattggtagtaccgatcatatgaccgatgcggaaatccttttataaagactgtcaagttgatcatagaaaaataatgcaaggatagctgaaagtataagatcgatccccgcgtgaatgcacgatatatctcctcgaaataatgttcagagatcgtcagaactttataaacacgcaaaccactttggctaatgcttatgcattacccagcggatatgccgcggaacattatctcattgtcatcacttatcactcatcacttcattagtcgggtcgggctaaagatcatcaaactgatcaatgatcggtcgagctagtgctccctgctgccatttcacacttgtatgtgcatgcatgtgtgtgaccgaattatcatcatctacctatttcttccatccaaactcagtgcacaaattttgtactccactagccacgaaccggctgggccaactcctatcctggttttctctggatctcgtcaggtgcagtgcagggagggaggtagtgcattgtatgggtttgcagcacgccgccgttgatcaggcagacatgggcaacttttccgttccatacgggctgtccaatgtccattgcccaaattaaatccaagataaaatcaatatccgcagcgatgcgatcagaaacatgaggcaatatatgcgcacaaaatccccctagtgcgtggcgctgctgtactgcaacagagcaaaaaccgtgcatactgccagagaaagaaaagcaatggcagcaacgcgcggacgaaagtgtatttggaaatgtttaatcgtggcctgtccctcggtccctgtaaagcgaccttatcggcttgtgcgtatgttgggtcctttctggtagagtacaagcggtacctgcttctggtacgtactgctgctactaccgacagttttcaaaaaaaaaaaaagaagaagaaaaagaaaaccaaagtataaaactcgttttataaaccgagaaagaataaaaatcagttgagtagattgagtttttatgagataatgatgttctcaaaatttctctgaatttcgagtgcatggcgtttaaggagaggggaacatctgagctcatatgccttgcagtgttcctgtaaaaatatcaaataatgttctgttaatatatgtacaaggtagtagtacatcatgaatgcgacgatacatgccgacttttatgacagtggtaagccggttttattcgtcgtgtaagccgtggtatgaagttgccaagattctctccactgtaaatcgatagagttattctgttaatcaccagaagaagctagcaaagagcggtggctcagccagtttagattcaatcatgtattcgtgtgttcttccggtctgactcgtcccgctggttgattttgtgcggtttgatttgatggacgtttttaaagtttagacctgttcagggtgcttcgttgtagtctggctttcatgtgtcgacgcgtcgtgatcatccggcacgttcagcgggtgcactttcatctcggtttgtcccttcttgtcgtcatcatcctccacctgcttgaagctggcgaggctggccagcgtctcgacggcgtcgacgacgccctcgatcctcgccgatatctctatcagcagcgacgccacggtgaagagcggcatcgcgtccatcagcgacatctccgccgccggttccaaggccaggacgggcgggagcgcgcgcaggtcgccctgaagctcgtgcacggccgtgttcatgtccgccacggcgaagtccagcgtcttggggctggtcatggcggcgaccgaggtggacgcctccctgagaacccgcgcgcactgcgaggccagccgcgtgcacacgtcgccgagcagccgcttgacgtgctcgggcgcctggacctcggcgcggacgcagctgttgagcgcctcgacgcagtacgcgcagtggcgcatcgcggcgcccaccttggtgtactgcgcgtacgggtggcggaagccgaaccgcccgtgcggcggctcccaccgcgccaggttggcctgcgagtcctccgacgccttggagttgagcacgcacttgtacccctccgacttggccgcggcgggcttcgccgcgaagtagtcctcgacgcagccctcgacggcgccggcgagcttctccatgttgcgcaccgtgaggaggtgcagctcctggccggcccacaccggccagatgacgacgcagacggcgaggcagatgacgatgccgatgccgatggtggacatccgctgctgcgccaggtccagcagctggtcgacgcggtaccccgacacggcgacgaggctgaacgtcaggatgaagatggtcacgccgtagtcgaaccgcgccttcaccgttggtatgaaccgcgagaaggtggccgccgcagctgttcaccatgcacgtacgcacgcacgcattattttacttgggtgtcagcgttgcacgtagtatgtgactgtgcaagtctttgtcacggcttacgaaacgagcctaacaaaacaggggcactacgtacggtggaggtaggcttatcaaatacgtacccagtaaaaacagggagccgctgaggatgaacggctcgagcttgtcgccggatttgtccgccacccagttcacgccgagcgcgagcagcccggcgctcgccgtcgcgacggctctgttgaatcccttgtacatgcatccacctgcacacacgcacgagtgtacaaaaacacggtgaggaacacagcaaactgacatgcaagagcatgcagaattcaccacacgacgttgtactactactcaccgacggtgtactcgaagaccacgacaaccgtcatgacggcccacatggcattgccgccgacgccgtcgtacacgggcctggtgtagtagacgatggagacgagggtgagagccaggccgactttgaggctgtgcaccgctctccggggatcgtcggcgccgatcttccacaccttcctggcgaagccggccaccgccgccctgaccgcgaccagcatcctcaccacccacgcccacgccctctcggcgacgccggcctcgtgctccaccgtcaccgacgagccctccggcaccgtcacccgccattccagactgccctgcacctgcgcttccctcgcggcggcgtccatgctgatggcgaccggtacacgagcgccgctgcacacaccagatgggtccctattgtaagcctcgattctctatgtacgcaacgaaaatgcggcctaaatttgcttcaattcgctcgcctttggtaagtacgactgggttgacctctgctctcgttgctttcgtttctgtggcaattattttctggacacacagatatattcctaggaagagtaaagcaagctaccaaagctagtttccaaagagaggaacgtgacaaaggcttctggccaaatgtgatctacctccctatgttggaatgaagtgagaagccatgatatggcttcgtatatatagccatgagagctccggcgtattggactttgacaagggagcacgatcaagggcgatgcaaaagaacgcttgttgcgctgcttgtgtcagccaggcaacgacgaccttgagcacacgaaaggctgggtacctgttagctgcggctaacgggctaaagtgcaacaaccatacagtgcattttggaaagaagattgccgctggaaatatgccgggaagtgggatatcgccaataggacggcgaggtgcggtgacgactatggtgcgatttcttttcaccttgttttgcctgccacgtacgtctgtgcactgttgtgtccctgatctgacttaactctcacttctacgtttgtggcttgtgttcgggcgcgactataaactctctaagctcaacgtgttaccagaattgatatcacgcctgcagcctggtgaagtggtgagggtacatgcaggtacaagcttaagctcgaaaccgtttagctcgttgacgaaaagcaaaagcaaaagcaaaacggatttactattttacttgcgatagatttttgacttctatcatttactttttcgttcgtaaaatctttcatcaaaattcgtattctcgtgtactcaatttacggtcacactcagttacagagcacttatactcagttacaatgtacttatacttagttacatagcacttacattcaattacagtgaaccaaaattatattttacaacagttttttttctagatttacgatttttttttatatatttgtctctttttcttgttatttcatttaaaacgggctatatccattggcatagttattaagaccagaccgaggatcgaaccgctaaggcacacgattcactggtttattggtcggaccaatcaaaccgctggtttaaagcggttcaaatagatgtgtgttataatacatgaacaacatgtgacatagctcgatggttgagacactccttgaaaagaagttcttgggtttgatccctcttagctcttttcctgttttctctaattcgaaactataaatctattgaaagattaataggtagtcccaatgagactttattgcatagtctacgtaggtgataccccgcgctttactgcgggtctacgtaggtgataccccgcgctttactgcgggattcatggataagtatatattaaatattgtcgaaatgatgaaagctgaaatgttgagaaaataatgtgaggaagataatttggcacatacttgttgatctttataatataatattgtagatgatgtgtcatgcttacatgggttttaaataggttataatagtaattgctagtgagtgaatatgtggcatgcttgcatggaattgcttacatgggttttaaataggctataatagtaattgctagtgagtgaagatgtggcatgcttgcatgggattttaaatgggttagaacagtaattgctagtgagtgatgatgtggcatgcttgtatgttgagctttagcttctaataattattagtgggtaccaactatatagaaagtatagattgtttcacctgcttcctatttgaatgacctccaataattagcagtgaactagaaaatggacaatatgccactctattcgtgtgatttcaatgaaatgccacatgctagaggaacgaaaactggagtcctcatccctcttgggttttcgaggcatcaacggtatatgaactaaagtccctaaccctcctaggacttcagggcatcaacagtacatattcaagagacagacaatatctatatactcaagagatttatattatctacatcttcgaggtgtcgagaagagagtcgagatctatatgatctagctatgtcttcaaagagttgaagatacaacttgcaatttttggcatctccttcaagctatgttcataactccttcatcaacgacatcttcgagaaactcgtccaaatcaacaagaaaacctatgacttggccattggagcggccaaggattccccgggcatgtagtgtgccccggatcacggagcccgccccgaaacaagttgcaagcgactcagggccccaggctagggcccaagcacaccctctacctgggctctccgtggagaactccgcccatttataggtaatggtgggtccggaggataaactttgaccaacaccatgatttaactgcagagtgcagcaacctggaaagcagctcaaccgcatgcttcaaggacgtggcatcgcacgcgggctcccgcatgcccacgtcaactgaaggaataggagggacgtgacatgttgcccctcgttctctcccacttagtctcacctcggcacctcgtggaggctgactgatggcccatgacagccgggcatagactttcttgcatgcagctccacttgtcagccgctaggtaaagttggcatattttctaatcaattatcttaagtttggctaagtttataaaaaaatataataatattttcaacacaaaatatatatattatgaaaatatacacaatattatatttaatgaaactaatttggtattgtagatgttgttaatgttttctataaatttaatcaaatttaatcaaatctaaagaagtttgattcagaaaaaagttaaaacaactttgcctgtttcctgagagatatggaaaaaaaaagaaccaaagatctttcagcacaaggagctctcggcgtctagcccattctccaaagtcagcgaggaggccaaaatgtaggcactcatggatgctagaaagctcaccgcttggttaactttgtcgctagaccggatctccggtcctaacttgtagatattttgtctctctatagttttctcatgctcttttaatgaaattggtggctcatcaatttgtttaaaaaaaactttgcttaaatcaactagctaccactacatccacaatcatagcacctgggacaatacacaacaacatatatacaaaatatatttggaattgctgaagatgccgccgcaaccatcacatcttgtttatatgaactatggttgacctaaaaagagttaggagcatatgattactgtacatgttagctatacttaaacgctatggatttaattaatactacctccatattttaatatatgacgctgttgactttttgtccaacatttgaccactcgtcttattcaaaaaatttatgtaattatcatttattttattgtgatttgattcgtcatcaaatattctttaaacatgacataagtattttcatatttgtacaaaaattttgaataaaacgaatggtaaaacgttggttgaaaagtcaacggtgtcatacattaaaatacggagggagtagctatcagttagctttatcattaacatcaatagagagcacaaatgctatgttgctctctttttcaacaatatcaatcatttatcactcgaagcatctccaagagctttgctagatggctctccaagaaaaaatttgacaaacttgagaaagtaaccctccaacacccttatcaacttgaccaaagtcctttccctgttggccaaatctgatcagccaaaatcgttggccatctatgggccctaccgtccgaatctcccctttcccctccctcgccctccctactctctcgcattgtctctccctctcctgcattgctcacttgcattgtcgcctccctgttcgagtgcaatgccaccacctccccttccgtgcgcagcgccgccgcctccccttccgcgcgcaatgccaccgcctttcctttcgtgcgttgcgtcgacgcctccccatccgtcgtagtgttaggccaacaacaacactaacttggccttcatccgctaaaagtagcaggtggcccatcgcatccctgatctcccacgtcgttgtcttccgccttgccgacttgtcgccccctccttctccggcctccgagcgccatcatcacccatcctgatttgcagctattgtagaagagggtttagacactggcatgtggacccataaaatttagagagtgagagatactgttggagcacacggaaaatatagagaagaactttttaactagctagcttaccaaatgagcaaatagaaatcaagtttcgacaaggctctggaagatactcttagctaggtcgcctcttgacacccctatgtatccatacatcattggtacttttcccttgctagatgagttgcaacggatggcgcagcggcggccgtgcaaggcgcatgccgtcgcactccgcacgattttcccgtcaattattataccggatggaaaagagaaggaaacattcgaagacgacctagctagagtcatagagcaaattacctagttccaagttccaacgggattggccatgaaccggaaaagaaccagagctccactcatctaggctctagcgtacttcgtgcgcgcgtacgaggccggccgggtagtggcagcagctgtatccaacagatctagtactagcccgctagcgcggccgaaatatcacgcgcgcgcgacgcgcgatagccaacttgcgcgcgaccaaccggccccgccccgcttgcaactacaactagtacttaagctagaacgcgatagatagcggcttctccggaccccatggccatctccatcgtccttgcttgtcaccaacatcatcgcgcctccgtactacgtactcctcccgcactttggcgtacggcgacgccgccatgattgctagctctttctctcctccggtgaatgcatgctcactggtcagtgttgctgggtggactcgatcacgatggtgtcagtggcgagcacactcgggcagcgcatcaccgtcgccgataaggacgctgcgtcatccgtgcatgcgcgctctctaggtacgtagtgaagagatcgatcgacacagaatctttgctttgctgcgcactactaattcacgaaacttccttcttcggtagctgtaaaatatcagtgcaccggtgtatcctgttgcgcattcgacttcacccaaggagctgagcgagtgagagtggccgtaactattacctgcacacaggtggttgcattctcaactgaacagtcgcaaagctatggcactcaccggactgcccgttctggtagagtcccagatgaaccggcaaaatacggcgagcacgcaaggtgcaggaaaacgcaccttaggatattctctgctttagacagagatccccgttcctctttatgttctgaatcgtacgttctaaagcgagatacacataaaaacggcaccttccccggtttctacatacgtacgttatcgattttttagagcggaatggataacgctgctagcgcctagctgtggccactgcccacagcggcacacggttcaaagtgaagcactgtcatgcacattttcgagccaccaaattgactcactccacactagtatatgcaactgtaccagtacaagttgtgttttacacccctagtatagtctagttccttttcttttctacatcaaacaactttgcgctgcacgattgtaataagaagtggtgaccgatcgaatacctgcatctttgatgtagaggttggtttgatttctactagtatcatcaaagaaaattgcttgtgcaaagatataatggatcataaatacgtcgaactttccaggcatcacaatcagattgttcgaactgaattgacgccacgttctcagcacaatcagcagcgcgtcgtatcgtatgcgtgcttgcttcgtgcgcgcgtaggctgttcggcatttggttctacactgctacggctaccgtgtcggagacgcgtttttccggcttcatcgatgggtgggtgccaagcaccgaggcacacagcatactaagctgctctgctcttctatgattgttcaattaattgtgccctggcgctgctggaacacagccgaactgcttgtgcgacttgacaaagcgcagcaactaccgaataatgttcgcctcatccctttctcgttcagataagagggccatatgcctgtaataatgtagcgagctctttttgaaaatatacgatggcattcaagaattgatcggaaaaaaatggaggcacacatgagtacatgacgtgttagaattatttactcatgatccaatttacttagcttaacacatactttctccgtactcgtaaaggaagtcgttttgaacagcgatacggtctccaaaacataattttgacttcttgtttctataaaaactagcatgatggcccgcgcagattacgcggctagcatcattatattttctctcatataatagcatatatattttctcattatatttttcaaatatattaaaatggcaacataattttaaattttgcaataactttacaaaactactaatgtgtaatattcatattatattgtattacgtgttagttattaattatttttaatatcaaaatttagtaatttgtaaattatatatattcctatatggactctagactcgtcttttaatatttatttttttaattccgaattttctgtaaattgtatttctatatacactctatgctcttcttgtaatattatttatttttatttctgaatttttattatttctaattgtatttctatttggactctaaaactcatctttcaatattctttaatttttaatttcgaatttcagttacttctaaattatattcctatattgactttaaactcttcttcccgtgtttttcttaatttcgaattttagatatttgtaaattatatttttatacggactctaaactctacttttaattttattatatttattccaaattttagttagttttaaattcctatatggactctatactctacttctaatattccttattttttaattccgaatttctatttttttcttaattatatttctatatgaactctatactctacttctaatattccttatttttaattccgaatttcagttatttcctaattgtatttctatatggactctatactctacttctaatattccttatttttaattccgaatttcagttattttctaattgtatttatatattgactctagtctcctcttctaatattccttattttttaattccgaatttctactatttctaaattgtatttctatatggactctagtctcctcttctaatattccttattttttaattccgaatttcagctatttttacattgtatttctatatggactctgtcttttctttttctccgattaatgtgagaatttctaggccatgagagcgaacgtggagggtccttttttattcctttaataatataatagatatttattgaaaagtgatatatgtatacttttatgacagtatttttcaagacaaatctattcatataatttttacattttcaaactcaacttgagagttatttatgatttatattctcaaggtttgtcttaaacattaacctaaacgactttctttacgagtacagagggagtaatcaccttgatataaatgtaaattaaggtgtttactgaccaaatgaattgaatccataagttgcttctgttcattttcttccttttgtccttcttcccttcttcctatttttcttccctgtgttctgtacgtcgggtagaggatgcaacgctaatgcacatagcactacgaatcccttctagtgcaatacatcaatcggactctattagggttttgggatttagcgtaggaattagtcgtcacttcttctcaacactttctttcctttcatttgcactagtggggttcaggggtaatccggatagaactctaggtcctgttcgtttccactaaaaaaaagtgaatgaaaatttggatactcatggcacgcttttcaaactgctaaacgatacgtttcgtgcaaaaactttcaatatgaaagttgctctaaaatataatattaatctattaatcatacgttattttttttagataatggaatagataacatccggcctttgctcaacagagttacagccaattattacattctatcactcgaacaaagagtgtagttcaaatagaattaaacacacccaaacattataaaagtgaccagaccaagataaggaacacacaattattcaagtatatttgtgaacctccatccatggttggcaaaaagttgcataaccgtcgtctcaagcttacggcatgcaaccttcaagagctctccatcttcatcacacttttgcaactgtgaccaaaatcggagccaatatgttgccctgaaaattgcctgcatatatgaagcagatagtgatttgttaaaaaccatatcattcctactcaaccacaaagcctaacatatagcagaagctcctacaagaattagttttgcgtaaaaacttaatttttatcttcatcttcgtttacaggagaatagaacatcacctaagtttgttaccacttatcatagtaacgtttatctcttatcttttattttcttatttgtttcttttttgttagggaagagaacgatgtaacttatctctccctaattatcttggcaataactgataaaatcaaccaccacaacgtagtagtacagagacttacagattgctgcgcattaaaatgttgtttatgcagaatatgtaaattatggaatatatattcagttttctcttaagtacatacatgcatgtgtggactcggatcatttcgtttttacttgcgaaagtacgacaccaatagtaaccggaagcttcagatcaacagaaagcaacagtgtcgcgcgctcgtgctgtacgtacctgctattctgtcacgggttgaatccgaagacattttagaggctgattgggtgccgttcacagtttgctatggaagttttggcaaagtgtgatatgtcatgagtcgatgatgaaggggtctaatttctcaaatgtgtgacacgtcgcagttatggtaagaaccaactttaggttgaaatggtaaaaattttgatgcttcacaagtgtggtagagtttcactaattctttattttttatctcacaaaacaatactaattctttttttttcttttgccttcgtccttaacaccacattgggatgctacgtgtttgttttcgtagagggagtagttggcagtgctatgccctttctacagtgatgcaaacccagtcaacttttctcatctctctcctatgcgaccacttgatcagtatccaacagtgagtaccctgattttatccctctctttaacggtaccaatagcaattaacaaattaactttctgaacttgtcaggcaacgtgaggtcaccaactatctcaatcagcagctaataaaaatcacaactccagtaattaatctcaacgctgatagattaactagacttgcatatatagataaaattcagcaggaaacaaaccaaataatcgagagctcggcgtataacagttgaagaccaaaccctagataaaataatcctctacccgtgctttctacacgatcagaagaaagggcactaacatgtaccaagtagcaagaccaggaaaataatctccagacctagcttcttctccaaccttcacggcggcagcaataatctcaattcgcatatgggatagccatcagctttcctggagaactctcaacagaacgacacaaaaaattcctccactgatacagggcagatgagatcagctcttaataaaaggagcacgcaggcccacatgaagtctgttcggactgacagactcaactaataaaaatagtaaaatgtactaattactttggtaatccagccgctaatgaccctattaatgatagttggttaattagcctatcggtacaggaaccgaacctatatatatactccctccattttttaatagatgcgtcattgacttttttttcacatgtttgaccatttgtcttatccaaaaaatttacgtaattataatttattttgctatgagttattttatcactcatagtactttaagtgtgatttatatcttatacattcgtataaaatttttaaataagacgaatggtcaaacatgtaagaaaaagtcaactgcgtcatctattaaaaaacaaaggtagtatattctttgaattgctcctgcacagccacttgtatttctccaaccaaaaatgccctggtcttggacacatcacaacttgtcattaattaacgtggatcggcaagtagtagcggagccaacagcattatcaagctcagacaactaacaatagcgttttccaacgataacaattttttttacgagccttaatgataatttgtagacttgtagtggatgtgttagcaacggagcctgggcggcaatcctatcagctgcctctgccgctttagggctaagggcatcatcaatgcatatatcaaaatcaggtattatggtggccccggcgagtcccaacgagtatatttgacatctccacaatgtatatgagactagaaagcaatagaactggagagaaaatcaatcatatctttctataaagttgatgtttgctaacttttaaagcttagcatgcaagtgtgtcacatcgttaccctagtaatattatctagagtatttcaaatcatatgcaagcgtaccacgtcattacccaccaataattattatctacaatattttaaatatcatgcaaatatgacatatcatttacaattttattgtatttttaaaactcaatatttaagcaatgtaaaatcattatgtgcacattattttcgtattatttaaatatatatctatcatttgcataatatataaaatgtattcattcacatatccacaataaagcgtgaggtattaactagtttttttaatccagcttatacaaaagcctcctatatggatcaccttcacaatctatagactacttctcaagaggcttaacacccccttatttacaaattatgtatgtcctaataagacatgtaataaatgctctaatggaaaaggtttaaggaaatacgaagcccacatgcaaggaattaaaattctgaccgagttttcacgaccgattcagctgccattccgtgacaacatactattattgtcagtcgaacactgtactgaactattgaaccactaaaatagtgagcaaggtacggacgagacactattactatactaactgctaagcaggcctaaaaatgcgtttgaccctctcacaatgactaaaacacaccagtttaagaaaataagactaacaatgtactatatccattttctaaatagatgatgctgatataacgtttgccattagttttatctaaaaatttaatataaatatacgcaaatataagccatgtttaaagtttttaatgacaaataactcacgaccgaataaataacacttgcacaaattttctaacaaaacgaatggttaaacatagtatcaacattcaacaacggtatctattaaaaaaatatctattttcaaattatatatgcaaatttcaaccctaaccactgcggcagtgtatgtccaagtacgtacgttatgcgtacctgaaactgaaagagaaccgcatagcatcggaccaaataaagcctgcttgagacttgaaagaaacgtgatgagatcgagctcaacggagtagcgacgtagcatgggagcttaatttcatagttaccacaagattgaatgatgcatccacacatttgcgtcgtaaaacgataggttcggcaggcgccaccacgattgacgggacccagtgtagtacgtgcgctatactgatcacacattaggtctgcctcttacttttttcgcgaacgcaggtctgcctcttactatatcgctatatcgcttgctaatcaatcaccacctctgccttcacgacccggcagatctttatctgcaatgctggaagcatttgcacgcgctgacatggcactgaagccttcctacgtggaggtccagaagcgtcgatgtattgacacgtcggcgctgtccacatgcatggctgcgcggcttcgctcagcgtagggcagaaatggcttggattaaaagacgcgaatattaaagaataacctaatattaaataattagaggggtaaaactttaaacccagatcatctaacctatcatcttgtgaagtttagccggaaaaccctatcttaaaaaatggcttggattaattaacttgttagcgcgctgcgcactaattaaccaaaagaggttgctaattatcctcctctgatctggtctctcatcggagcatctgtccgtcggattatgtagattaaaagctaattcggtaagcgcacaagggttaaaatgatcacaaaatgagggttgctatcatgcttggggaaaagggaatcccactcactatagtcagatcttttttattgtgttttgtgatcccatgttataattaatcctcggtctaatcatggtttaggttaaattagttaaagtaaaagtgattgtaggagcaaaacataattaatggtcggaatggaggctctcctttagtataatcttgcgggcttggaaaagcaagcgaaatgtaccctcttgtacttgaaaccactagtaatgggatgatatttcgatggatgtgggaaagaggtgacctgtgtttagtggaaaagaaggattgctgttgttgcagcagtgtgcaccccaggatttcgcgctctctgctggctgatgtgtcaatgtatcatgttcagctatagctagtgtgacatggagatgtctctctagaatattgtagtcctgcaggagaagcaaaattggactgtctcatagtactacaaccaaacaagattagatgggcaatagaaactaatggatgcaaggtaccacatcgtcaggtgaaacatgaaaacaggacgaggatgatggcatcacttaatttgtcagttagggctggttttgtttgagatctattggtcttaccaatatttggcaatttcaaaagtgtttattgtccatttggtttggagccaaattttgacatgcctaagaaaataggccatttcaaccattaatttaggctattttggcttcaatacaaacacaattttacctttgccaaaattagtcatgctaaaagttaccaaaatttaacattgacaaaaattggtaaggccaatttaggccacaaactaaacctgcccttggcactgatagaatccagggtgccaaccacatacggaacacatgaaactgcgaaataatgaggcatggcaccgtttgtgctagaaaagacagcaatagtcaagaggggatagccatccatctttgaattaagaagaaaatccctcaaagaaacctgtcgatcggggctcttaaacccctctgtatagactgtagtgggtgaacagaaagccaaataccccgcaaaaaaaaaacagcaagccaaataagttatgtgatctattctcacctgcttgtactaacacattttttttccggatctgatttctttcggcctcattaccacgcgaaaaaaaaaatcaaacatacgtgcatcgaatttgaaatgtgagacattgagaccactgctaagagaatttccgccaatctttagaaaaaagatatcaaaaggtaaaagattggagacaggaaagatatatacttggtgtaaaattacagtcctttagtgcggcactcataattttggtctcgatcagcaccattgcaaatttggacctgaaaattttgacctcgacggtgtcaaacaccaggctgacctgccgcggagacaggaaccgaatttttttcccccgtcgattcgtacgcgcatgtcttgccattttcctcacccagtcaccaaaagtcaccaacgccggctttaatttgttatccagctcagggctgaggccaacgacaggccgtggcgccgtgcgtgttggcatgcacacaacagagaccagatatcgatttgcgagattgttcgacgatggtaatcttccaaggctggaaagtccatcgaagcgaaggcatccacaataacgctttcgattgttttgccatggagacatgataagaaaaacagacgatacacagttatctagctcatcttcaccatatatatactagtacttcctcactccgtcaaaagtttagagaaagtaaaggagaccatcacccaactaacatattggtgtgattaattaagaggcctttccacgtcctgcaaaggcggcaattttgttcacgactctgtttaaagtgaccgcagcctgaacggatggctggtgagtgcaagaagagagcacttatcgtggtgcaaaagacgctatcatgctttgctagggctcggtcgggaggacgacggctcatattgagatgccaagccgcctatcacataagtagtggaacgaccaaacgcatatcgtacgagcgaattctttccagcacgcgacaaagaacaacataggagctagtctactctctagaggcatgtatctgcagattgatggtgacttaatctggcctttcccctccggtgggtggcgcacggcggttggtggaggaaatgctcaccgatcaccgagaggaagtgtccttcagattttatgcaacttgagataattttccttattgctatgttaccgctgaataccgtaggaaagatatgatcttcgcagtggcggatcttgaaacttcctagagcatagcaaaacacgtgttaaagattttacacaatgttgaacaattaataaaaatattaaagtcattcgactaatcttagtgtgggattaggatcctctaccttcgaagtcacatgactttaacattactatgagcccgataaatcttgtatccacgtattagtgacaaagatacagtaactttgaagataggggatgtcaatcgcctagtgcagtgtgtgatcaactagcaagcctagtgtcgttgggccttggatcagcccctagatctttgtagagctcggtgaagtaatgaactgcttttggtcaatcaactctgcatttgtaaggctgagttcgaacctacatgttcaaaacttctctttagcacgaaaaatagaatgatttattagcacatgattaattataatggatcagctataaaaaaaccttgaacatggagtaatatgattttttaatcaactttcctatagaaagttttgcaaaaaacgcatcgtttaatagttcggaaaacatgcgcttcaaaaacgagggtagaagttggataatgggagaaaagaacccactaaagctttgtcataagttggtgtggcgtcgaatatatttttaacactacttaaaaaaaagattttcgtatttcgtagatttttttttcagacagcttaaattttgaaagccccatttcccaacatgtcatttcgaaagggaataagttcactttgggtccctttatttatcgcccaatccgattttcatcccttgatcgcaaaaccgggtacgacgggttcccaacttacgaaaccgtttaaataaggtccttcggcagtatttgaccccggttttggctgaggttgcgtctacgtggcttcttttgactaggtctttgtctaacgtgtcatttaaatgtgggccccaccattttaaaattatttttttatgtagctgaaattggggtcccatgtttttttattatttttccgggatccaattgccacgtaaacgccacgtcaatgacacgtgggacgaggacctagtcaaacctgccatgtaggcgtcacgtcatccaaaaccgggcacaatactatcgagggatctcgtctgcacggttttgtaaagttgggggatgcattgtatccggttttctggtctgaggacaaaatcagactggcgacaaattaagggacctaaagtgaacttattcctttcgaaaggggctgacaaatttcgaaacgcccattgaactgccactcccagtcgccccgctccgattatcatgagtccaatttagccgaaggacccttaggcacaagatttgtcagccccttgcggccggcttccacgccggttgggcgaaaaaggatttatcagccctttgtcgtttgatgggctttcgagatagaggctcaaataggctttgaactagatgtaaatgggccatagtcattggacatgagtactttccttttgggcctctacaaatggattagaggttgcaaagcacgcgtcacgcggagaatttaggcctagggatctcggacaaatacaaaggacaaaggattctgttactaaagcaggcctccctgacgtccaagctgctaagtactagcacgtctgatgatcacggaccatcaaccccgaatcgcacgttatacgatccaagatccaaacgaaatagactacgccaaatcctacactatactgctgacattcgtggccaaagcctgcttcatggtccatagacaaaccactgttgttccttcctgacaagtcgtcaaaccaaaaatgggagaggtacggtgttggtgaacggagtacttactcctaccaaacgagagtgtactaggagcaacaaaacacgcactcatccccctatttatgtggcgccaaagcagcagtgccaccgatcccgacgtaacagaagccaaccgaaggtaaagggagggagggcaactgggcaaggcaaaagcaccggggataacgagcgcgcaatgatgccacgccgcggcgggcgggccaaagcgtagtacgcgaaaggaggccacaggagtggaggagaagagagggaagtgaacagtctcggccggcccaaagcggatggccccgagccaatcgccggtaaaagcggggggcgaagcgcccgcctctcccgcccggaggggccgcggcctcgcgtgcactcacggcacgcgacgcatgtggcgtcacaggagaagacaagacgaggcgcggttggtgtcccgcccgcgctcgctcgatcggcagagtaggccggttgggctggggtcgcgcgcgggggggtctctcttgcgggaatcatcgcggcgcaggagtaccaagcgtgtactacgtgttaacccgctgtgcaacgcagccgcgaagcattggcgatggcaccgcgcgggatggccagcgtgcgccctgcgtgggcggcaggtggccgacaggcgccgggccggggcgggcgcgagggacgaggcggagcggcgtggtggtggtggcgacggccggcccaggccagggggctggaggagccacgtgacgatcgacgtgaggagcgcccgggtctctcgcggcgttcgaggagcggtggtgggcgcagtactgtgtagcagaccgccagtggtcggggggctggtgctactgtagttgctctgtcgactgtcggagcaggtcacgaggcggcagcgggacattccctggcccctgtcgtgcgtgccccgtttattacggctctcgatcgaccatttgcaccataggtttacgggttacagtacgtacttacgtttggtgatcgaagataacggccgtcggttggccacataatttttgtgtgcgcctgaatcctgaggtaccccagattccagttttagcctcatgtgatgtggaacgatttggaaagatctgctgggacgagcgagccgcaatatggagcgtgcatgagtagttgtgtagtaccaaacgcgatggatcaggacgctgctccatcccccaattttggtgggggtggtccaatccaaggccttgctcggccaaaagatctcgcaaacgtcgctgttgctttcttcttttttttttcgctttccttttcgtggtccacggagccactggcgctcgaagaccgtgagcagagtgagccagcagcaatcgagcatgcatgagcaggaacaccactgcaccaggactattccgtgccccacaaagacaaactgtaaaaactccctgcacggcatacgtccctgccgacgtgtgcgcctcgcgacgtgccacgtctctccgcgggcccacctgtcacctcgagaacaactgctacttaccataaagaatctggcgtcgatcgatcacaagctgcgtatgcatgcccacttgtacaggtttgctgctggattactcctagatcgatgctgtacctgtactggagtggagtgtatatcgatcgctctcgatcctcatcgccatcgaggaagatccagcccaagcgcgcgcgatcgcgatcacacaaacgaccgatctagtgatcatcagctagctgttcttacgctttgacggctgcatccatatagtactgccagtgggctataccacgtaactatcgaaccttcaggccgagattatattaggcgattactaccatgacgacgaccctgatccagtccaaacgctacagtccgccgatccgactcatcacagctcgtcgttctcgcctcggctggtcttggatgcaaccgagcgccgacatgtttgaagtccgaggctgcgagctcgatcgatcacggccgctcgccgactgattacccgatcggcacggcatggcgacacccaccgcgctcgctggctcgctcggtcggggtgtcgctgaagcaagcgactgtggatggcctgaccagctcgcgtgacgtcgatggccggccggacgacgacgacgtgctgcgctgctgccatatatacgatcgaggaaggttggaggggagggaataacggcgcgcttgtgaggttgctgtacgcgtaatatcggccgcgtcgatgtcgtcgagctctgcatatggtgtggaatctccccggtgatacgatgttgctttctagtttgactcgatccggccatgttgtgaaaagatggtgctgattgatctgagagaaagatggtgctgatcgatctgagcgactagaatagacgttaatttactgaagtgaagtgatatatatgttccccgcaaagaaaagttactgcgcacaatgattgtgcgtgctaaaaataactgtagcatgtgtgctctgcatcaaatggtgactatatatagtagtaaacgaaaacatgttgtactactaatttgacatgcatgtatggttaagtaagcattaactagagtccggcaaatttagcacgacacatttggtaacgaactgcatccagcgttaatttcagcatccttaaaccggagtagtccatccagtactctcttcttttcacgaagtgaggggcatgtggaaatgagagctcgagcaaaagcaaggccttttggatcgtgtcattgaccttgccagactacgtacatatacttggaaagcttcaagagacaaaattatgggccttaacgccaaaaatgatgggacgctacgtgtcttcaactagcctttaactagcccttgacctcactgttgagtaagtactgcccatgaatccgcactagtatgaccacaacggatttgttagaaaacttttggtaagttttttacccctaaaacttttagatttgtgaccatcagatcatctcaaaatttatgcatgaagaaaaaatactataaaaaaatcttcacacgtatcatgcgtaagatcacagtactatctaaccaaagcatcgttgaatgcaagttttaaaagttatattgtaggtaaagtgtagttacagtgcaattatagtatagttacagtacagttacaatgtagttacaatataattacacttcaattatactatagttacgtctgaaagtttttttaaaaaaacttgcgacggttttttagatccccgatcacaatcagccgctgaacatttagtattaagatataaattgggcataaaaacgatgggtcatctcaaaattttgaatccaaaatgttgagactctctgctataagtaaaatctatagtcaaggccgcgtccaaaatactgaaaaagtctcatttggaaacatagtatagtttgaacttcttatttcaataatgataatttgaacttctatgaactcgaaatatatgagtttgtgatctaatgttcttccactagaatcgaacttcttctattacatactggagtattagtactgaggctggtacagtaggaccatacaatgcaattacacattgcagtgaatatctaattaatttatacaccctttcctctccctttgttgccctaccaggctgcaaaatgattgtgaaatggttggcgtatttggagggacaatcatgaaaagtcaggcatcactacaaaaaaaaggcagtggaaggaaaccctagaaatattctcttggtagcctcagaagtaggtgaccacatatgattgggttagcacttggtagcaagaataatactagtgcagaattaaccataggtgtcctattctgtttctgttagcaacaattgtagtactagcatgggaacatgttagtatgataaatttatgtattcgtgggcttgcaaaataggctactctatctatttttcgttttaattatttttctagtcaaacttcttttaagtttgataaaatttatagaaaatatagtagtattttcaacacaaaacaaacatactatcaaaatactttctccatcccaaaatataagtatttcttatgttggtacaagtattaaaaatagatgataatgattaaaggaagtgtgtaattggttgaaaagaaatgtaggtgaagaataatgactgtgtttgcttgagagaagaatgtaggtggagaaatagtttcattttgacaactgacctaaaggcacagtgatacagtcaatgactacaatatctttctgccacccaagtcattgcattgtcttatggcagttcatgattttattctcttcctcaaggtacgtacgccagtagtagatctacgtgccgttgctagggaaaaaaaccaataattagcgtcgtacatatactttagaatagaagtccacattatttggacagaagtggtcctaattctctgccaggataaagtcctaaacttctcgtcattcagtttaatctacggagacagttcaaactggcttcaaactgattcacgttagttttacgtcatggtgatccatatatatcccactaaccgtcgtggacttgatttgcagtattatactctgcacaaatccagagcagatatctttgagtatgagtgacgaaaatgacgctcgatgattaggactaattgctactgcttagacccatatgtagctcgacgaacatccattgaaaatgcacatggaaaaggtgcatatatacatagggcactcgatcttgataataaagctagctgaaaaagacaaggtgcactatcgatatcagatcaattctcatttggagaagtcatgtaaacatgcactttgcaaggatggatattgcagtacgttctcttcccaggaaaaaaactaggtttgaataattttagttactcctatgttgcataagttaatttcataagtaagctcatagaagattgcctgcagtgtaaaattgaattaaaaaaatggccggctcatgtaaatcattgtgaaatgtccactatttttggatagcgataagttattctatactaccgagtttactctatgcaaagcttctacctcaaacttttagaggtcgggaaggatgagttccgaaggcagcgggtgtgttcggcaccctttttcccaacccctctccctcgttttttgcgcgcacgttttttaaattgctaaacggtgcgttttatgcaaaaagtttctgtatgaaatttgcttaaaaatttcaaattaatctatttttgaaaaaaaagctaatacttaattaatcacgcgctaatgtactgcttcgttttccgtgcatactcttctagactgggaacgggagtagcgaacacacctggcaccccttttcccaacccatctccctggttttccgtgcacacgctttttaaactgttaaatggtgcgttttttacaaaaagtttatataaaaaagttgcttaaaaatcaaattaatctattttttaaaaagaattagctaatatttaattaatcacgtattaatacaccattctgttttacgtgcataatattccaggctgggaacagacagtagcgaacacaccctagtcagtattgtaacgctgggtccggtgatggtttcagaggtgagcagcaactcaacgtaccggcgcgcggcggcaccgcccgcaccggcctagctacttaatcccccgacccaaatacgcgaggggcaaaacggcagaaattaccgtctacccttgcaaattgcggtcaccaactcataacgcggcccgagaggcgggccagggaggcaccagctactagctacagcctacaggcgacctcttccccctccctttgcctgccccgccgctccccgcgcctacagtatttatcgcgccctcgatcgcacgatgtgcgcttaaacccctttgccccccctccttccccctgccctccctctctcttccccgcgcacgctacgttcgttcgctacgcacagcgcccccacgccacgcttcggttcttctactggtgcacagcacaaccggggcggtgagcttgatgcatggcggagtcgctgggactgggagcgctctgccgcggcgggggatggtgctacgccgcgatctggcgctccgaccgtcgcgacccacggtgagtcagtgagctagctctcggtctctaccgtagatccactcgatcggtgctagctaggctgctagctttgcctatacatgcgtacacacgcgattcgaacctggtagtaggcgtcgggactatttctttttccgctgcatgtttcattggataactggaaacgggaacggacgattttttcgctcccaaccttcctgattttgggcttctgattgccagtccgggttcgtaaattgttcgtcatgcttttgcgccgcggtgcttgatgcatgtgcgtttgataaaaaaaatgagacatggccaagctttgtggtactacatgtcacacagatgaacaacggttttgtaggaaaatagtaccagcacgatttttcgaatttcgagtgcgcattgagatctcaagaaccttgcagttatgtttgggaaattaagatggctgcactcttcactgtcagaaaatgataacacaattccatctgaagtctgaactctagttttcccgtatatgctcatttcttacactgagcctactgcgatttatgcacagtcttcaagaactttcttcaggccggaagtagcgtatacccactggcagtttactgttgctaccttccaatttctgcctgtaagctactagtgtgctaaccagtattcataattcttgtttgttttcacttgcaaataaaaatatttgaggaatttgcaaggcagtgctaatttactgatacgtgtgccaaagttccacagcactagtagacgataatttttaccccctagcccttttgaccacaattgtgcttcactttaagcagggctgtaaaaagtaggtttcttttcctccctttcctagacataatatgtagctccaccaaaattgacagaaagattgtctcctcttttctttttggacacattgcaaaagttaatcatgcatcatcaatcatttttttgttgtgtttctttgcttttatttccgtatgatctatgcagcttttatatcttctttatttttgggtaagaatcagtagactcgatccttcctgctctttggtaatccaagttcttacagatgcttaatttgatgtgtaaggttgcttacgatcggtgagttccacagtgaagatggtaccagaaatgttgttgagaagatgcttaatcaggtccatgttgttggagaagggtatggcaaagttttcctttctatactttagtgagttgaaccgttggagctcttctatatctatactatgcctgatattttggttgcttgtaccgtgaccacggccaactatatggtacagattttcctttcaaactattttaaaggaattattaaccattttcggaatattgactttcacaaatccgcctaactcttgcctccctaagtgtttgacttctactacttcattggggttgtggttttttctttctctgaattcctttaggatggttttaccctcaaagatcaactacttactgatattgtgtcatcttttgtctcagcatcatagggagagctctagtaagtggagagtgccaatggatttctgatacctcctttagttttgcccagacaagtgatgcagataaccaagacttatttcaggtacatatttcctatcatgttcttcctttattgggttctatttaaagtcacaattctacttttgtagacggtgtaatttagattcttagactcaaagctcatgtgtgttgacaaacaacaccacatggttcattacgtagaaaggccacatgaattcaaaataatattttcacttggcatagatccaattaaccctttcaactgtattcttagttcattgcagaaaataagatgtttctttattttaacagaagaaggttaccttcttgtagggctatacttggtggcagcatcagttcctgtgtggaataaaggtttgtgatcctttgttataattgggttttaatttttttaatgataattgaacaaaggatatactactactagctttataccaacttggagaagaatttggttcattatacctgactgaattgacatatatctacagactattgcagtaatacctattgcagatcttggtgtcgcacagtttggttccatgcaaaaggttggtataagttgacaaatgcaattaattttcatagctatccagtagaaatggccattttctacggtttcaaaaaaaaaaaaggccatttcatgattatggtaccgttttttttcattatattttgttttcaggtactgtagaatttcttttacatgaattcatttaagcggctatttttttatctatacctattaagaaatatctctcttttttgggttggaaattgtttaacaatttgtggtgttgtaacaaatatatgttctgtatatttcctcattggctcaatatgttattttgtcattatggatctggacaagccaatatgctccatttcttactaaaacacaattttcacatttaccagatttctgagtgcttggagtttctggatcaagttaagggcatattttgtcagagggaaatcgttccgtgggatctttctgctgaagaaattcaaagaaatgttctcccatatcatcagcaatttcaactcagttctctaagtagtgcagatggtcttacaaatatcaagactgacccagaaaacaagaaacttctggagaactcagcaagtgtagagtctctacgtagtttagcaagtttttcaagcaaatactctcagagttcttcaaacggtttcacctcctatgaaagctgcaacagtatgaatcctcatatagtggccatgccagtgaactccaaatcaataaatacggtgagagcatttaatagtaccggaaaattgctgcagcacaatattggttcagaaaacccactacagattaaattctgtcaacatcctgattctaatctggcaagtgcaacagacgtttttttaagtttgaacaatcttccgagaatagagaacgagatatcatgcccacctaacaagctaggatattgcatacaaagtgagaagccatatagttttcagagttcattctcatcttgtttttctgtgggtgatgagctgaagccaattttatttgacagtgccacttcttttgttcagaatgacttaatgcaagagttcaatctcactggatttacttctcaggctgattctgcggttcatgagttacccaaacaaattctaggggaaacagctactggagcattatattctgacagaaaaagtaacaatggaagttctgatttgctggatggtacaatatttgatccctttgtgcaagaatggtgcgataacaatgccttactagaaggaaacactccccattttggtgccactaccgccgattctgttacagaacatgcaagcagttatccattgtcagttgaagagaggagcttgttttcagaatctgtctttgaggaactacttggtgttagtggcaatgtgaatacggatgcaccgggtgattcagctgtggtgatggctggtgatccattagtcggccttgtctcaggctgtcaattgccaacgtacactcttcaggactctctttcagtgtgcaagccacaacaagaaccatcactggatttcccttccggtagcgatacgtctgaacatgtgccaaatggatcatcaaagatgatcccactgtccctaggggcgttgtccatggacgattgttgcagtttgaacacggcacattccaaggtcagccaggttaaaaggcctgaggaagtgaaggtagtgaagaaaagagccagaccgggtgagagcacacggccaagaccaaaggaccggcagcagatacaggatcgtgtcaaggaactacgtgagatagtcccaaacagtgctaaggtaatcagtattgaattacattttgttgtgcctaggttcatggaaactgactgagttttgttgtcttgtgcacaacagtgtagcattgacgctttgttggaccgaacaatcaaacatatgctctttctgcaaagcgtaacaaagtatgccgagaaaattaagcaagctgatgaacctaaggtatgccatgctgaacactgcatatctataccttacacaacataaactattccagttatgctttagtgcttatcctgtctttctatcatgtgaagatgatcagcaacaaggatagtggcgctgtcctgaaagagaactcaagtggtgttgtcttgaaagataactctagtgctggaagcaataatggtggtgccacttgggcctatgaggttgcaggacggaccatggtttgcccaataatcatcgaggatctttcaccacctggtcagatgcttgtggaggtatttttcagaactaagtatagtatactgctctttttgcacgatgcagaaatttgaaacgatctctttgttttctgtccgacagatgctttgtgaggaacgcggatttttcctggagatagcagacacaattcggggatttggactgacaatcttgaagggcctgatggagctccgtgatggcaagatcatggctcgatttctcgtcgaggtagagaacaagatagtagcttttttggctttgctctttctatcttcattatttgcgtgcttattctgttgtttggctttgcaggcaaacaagaatgttactaggatggacatattcttgtcactcgttcagttacttcagcaaaatagcctcaaccgatcctctgaccagatatcaaaggtcattaggaatggggttccatcgtttgcagagcatcagcaatctccaatatcagtgccggttggccttgcagatagatgacagattaacagtgaccacagacacttggattagatcagattaggaggcatcaactgaaaacattcagattgctgattgccgctggaagttgactaccaaggggtaaggtttgttagatatgataagttttgaggatgtaaaatatgtgcattgcatcattaagagatattctctccatttagtgttggtcattccaagatgtacaaatactaaacaaatttaggaatcaggcttgtaatcagaattcaggacactgttgtgggtgcatgctgttctgtgtgtagtgatttgttgacttgttttttcccctttggtgtgcaaatgacttccctaataattgcatcgtcatggctggttttttctggtgtgtatatgttatcatgagcagataaccttgtccttgatctctttctctcttgtatttcagtgttattactctttaaagaccaatcggaaacaggaacgagttcagaagtttccgtggagtgtttgatccaaaagtaggagaaaatgaggaccatcaacacatacactaggctgatggcaaagattttaaaatttggagtttattttgattatttttcccttgtagtatattgttcagccttgactttaaaaccacaaagaataagtatataacagtttactataaataatatttttagtttactaaaaataatgtttttaagttactttttaaattttgtacggcttatcggttatacctaaaccgattatataaacaaaatattagttcacctagaagattattagtagtttataaaatctcccttcgctcacctagaagactacttcacctagaagagaatactattctgccagggcagaaagcagagcgatagagttaaaatacatttcctgccgctggcccttgttgacaccttgactacgaaatgtattcgcttgctgacgacgtctgcttacttgtattcgaatccatgatgcagtgcccgtttaggaaagcttttctaaagtcaaaagctcctcaaaatccaaaataaaaaattaaaaaaaaatcagaagctctctagtttcgaagtttgctaatcaatcagcagctgaatctgaagctcctgcccatcacgtcgtggcacgatgtaagcctcaagtcctcctcaaacgtgagtaaggcccagtaactcgtggcgtacgagggcccagaaagcgagtccggcccatgaggggcccaatagcccgcacgctccttccatctttgacctcgtctcgtctcgtctcgtctcgtctcgtgtcgcctcaacccaaccccgtctcctccttcctttcgcctctcatctaccccgtcgctctcaccgtcgcgttattttttcgccccccatctttgaaccaaacagccaacctcctcctcctcctcctcctcctcctcctcggcctcggcctcggttcctcctccccgccgatcccgccgctataaatccctcccagccgcgcggctcggagacgcgctcgccgctcgctcgctcgtcgctgctctgttccacaaccgccggcggccggagagggagggaaaggagagggagggaggggggaggcgggggcgatggcgaagctgtacgtgcaggcggtgccgccgccggatctgaacaggaacacggagtggttcatgtacccgggcgtctggacgacctacatctgcatcctcttcttctcctggctcctcgtcctctccgtcttcggctgcacgcccggcatggcctggaccgtcgtcaatctcttccacttcgcggtaatcctccccgccttgcgccacgtcctccattcattaccattcccgtcgtcatcgtcgtcgtccgttttgtgagtgccactacgcgcttgctttgtaaatggtggggcatgagcggggtcgcctctgtggatctgaactgaagaggaggagggtgtgacggaattttcgatatagctgtaggtagtgtggagcgcatggttgtggatgtcccgtgtaggtgcttgtgctaaacattttgttgtgtgtgtgtgcttatgctcctctcgtttacatgccgtattgccgtattgtttggtcccaaattgagtaattgatttacatagccatcagcattacggtatggtttaggtccatctacctgatggtattagttttggcactatcagttgcttgcagtggacatacactgaaatcctgtgcagccatgcggtcacattaatgtaggtagggttagtacttagtagcttattataccagtttcagggtgtctcctcccagttcaatataaatttagttaggtttttcagaatttataaccaaaagcagaaggggaacatctgccgtgtttccatttcggtactgaattaccgactgcgatcactttctgtgaatggatagcttgtccaaatgctccctcaggtgcccgctgattcaacgtagttggttttataaactttggtaaggggctttgtaatccatgcaatgtgaagttaaagtgctaacccataaatattcagagtaataacaatgccacttctattgtgagtgccgtgctgcggtaacatgtagttttgcattgaatgattatgttgttatatgagggctatccaaacattgttgcgaatcgaagctcctttagcttacttacatttataaatggttggattattatttttacacaaacacaagtaaagccattgacctgtatattatagggtttgttcattgatactgagtttttgttacccaactattctctttgcattttcgttagcatttctctatagcatcggatgatacctaccgtgtccaatgatttcccacttaatcgaataatcttatgtttcagatcacataccactttttccattggaagaagggaacaccttttgctgatgaccagggaatgtacaacacattgacttggtgggagcaaatggacaatggcaaacagcttactcgcaacaggaagttccttgttgtagttcctgttgtcctgtaagtattcttctattacttcttagcatccatttcaattatacaaacttattggcgggcacttaggatttaggagcaataacaggcaacatgtactcaatgtttcattagcccactatagcaccatcatgatagacttggagctgcttatttgcatatattatgatttctgtaaagtcaattctgaacgaaaggctccaatcattttaaattgttgtaatatcttttctaagcccatttgatgccatctaatgttaggacatttaagttgtttcactattttacagatattagaatcggttaatgattatacatcctatgatgtagtcaacgtctgtcttaacggtagtattccacagttctgtgcttgagttcatagatatatcttatatacaccatctgaatcggatgcagttatacttgtaccttagtactaaataaaggtattcttccagtttatttttgctgtttgaccatcatagttgcttgtatgaccccagttagccttttgggagggagtgtttcaaataagtaattgatttgaacaacagctatatgctgcaatgaaatacttgatcatgtaggtagttgcacaacccttatatgatactagtctctttcccagctatttctagatagacataaatcactgggctttcgcagatttttaagaaagtggcacatttgcacaagtaactactcatgcatttaaaaatttagacataatttggcccatcagagggaataacatgcttgttttagctttcttgagaagtgaaaataaaatcctatccaatttacttgagcctgcacttctatacatttatgtctttttaatagggctctagctgaactattatgaattctcttcagcatgaattcagcctgtccatgaaaggctaactgcaatgatcactgtaaaaagcctctcgtgtttgaggttctgtattgtacttttcatagcctcaaagtagcatcacctcctgttcactgatgacaattatgatttatgttctcattttggcctgataatccccatcttgctgctaagagacgagttgtattccatcttcaggcactagttctttaaaaaaatgttttagaacagattgttaaactttcaaaacttggacttctaataacatgatacaccaaatcatgtggaaatgatataactagatttgtcccccgaaaaacactgacatcgttggattttccataaaggtctctgctaacttctacatgaaacgccacttctctagttaatgaagaaattcctgctatatttcaccatctgactggagttatggagcagaatagcagttgcatttttttttagataatggaattcatttcggcctttgctttagaaaatctacagccagttattacagaggtttcaggacaaatgattgcgaattacagaatcacagcttgattaaaaacaagaaaactacttaaaataccacctcaaatacggaatttccatagaagacagagaatagcagattattaatgccttacaattttcattcactgcaatgatacctagtcagggtgcaatgagaaaaaagccatctttatttttagcattaacaccaatattccagttacagaagatactccctgtcttcaaatacttttcactcgatattgttcatcttcaaattttgaccactcatcttatttggaaaaaatggcatattaacgaagtgtgttgcatcctacttacagtcacgaaacctccgtacatcataatctaaccattcaatatttattgtggtcaaagttaaaattttactaatcaacagtgacatattccaaaccggaggtagtagatttttggaatcagtctgaggcatggcatatagttgaatgctttagctgcattaccaacagtgattctgttggcttctgtacattgctcatggttaatgatatttgcacacatggtattataactgtagaacagtaaatatggactgatgtttcatgtgacctctttatttttcctgttgcaaatattttcaggcactgtgaataggcatcctaggtcgtttctagtattctagtcctgaaatagacaagattttagtgcctaattcagagctgctgttatgctgtcctaatatgctatgggttagggttcatatggggtaaacacggccaggaagatagcggggcggcgacggctactaggggtaagagtaggacttaggttggggagactaattctgattcatttgttaattagaatgacgatacaatccatccttatacagctggaggaaaagacccaatctaatctcaggatagggccttgacccctcggcccactaggcctcgaccccttggcccctacctatgacaaatatctttagagaaatataatgcagaatcaactattttctccatgatacatagatatgtaacgatacctgctgtgtggttttatacttgtgtcttatgtttaagatgcttattatgcatcgctgaatgcagtggtaaccattttgctattttgtcgacaggtatttgatagcttcacacactacagactaccaacatcctatgctcttcctcaacacccttgcagtcgcagtgctcgtggtcgctaaactaccgaacatgcacaaggtccggatttttggaattaatgctgggaactaggcagcaggatccttcagcagacatctacctatcttcctttccagttcatctggctcatcagagtatcaaggagtagagcttaaatgttgttagctgatgggttgtgatcgttgtatagagagatgctcagaggctgaaaacgatgctgctgtatatctgatgtacacgaattctgtagactcttaacgctgctatatgctttgatacaaatatctgtcagttgctgcatgtagagtcttgttttcagaacaataccttcatatacttgttttcagaaccatacttgtatggttctccaagataggaacacagtgcgggtcgcgtcaaacgcacaggtgatgggaaattatttcaaacagttgtggttgatgtagctttgcacagggcagcagtcagcagaagtgcgactctacaagacaccaaaagaaacacgtttgctcatctggcacgatgacatcagtgcaactcaatttagattgagttgtttcgcggcatccctaatgtgtgttacacgagggcttttttgtttttgtctggtataagagaatccttcgcccgaattgctctgtcaaaacaagaatttcttcctctttcgttttcggtaaatgctgaatgcttgagccgaccgcaaaaggtgggagacgacgccggcgtcctgccgctccatccaccatccgcacaacgtgctgcaacgtcctggggtgggtgaaaaaccgtggtgaaaactgaaaaccccgtgcaccgaattttaccggcggctttccttgcttccatacgaagtctgatgactcggagaaacggtgaggacttggcaacagtgacatccactacaccggcattgtcgtccgctgatttggaccgctgtcccggccggcctcatcagcatcagccgaacccaacccacctttattcccataccgctcacacgcaacagctgaatcattccccgctagcgacgtggtatattttccccctccctcggcctctgattttatttttgaacttttcaaattcttaattttaaaataaacattttcaagatttaaacttttggccatgtcaggcaagctggcttgaccaaaagattcagatttaagaaataagttttagaatagtttgtttgtaaaaataacaaattcaaaataataaaaactctcggtgtctctcctcaccggcgatactcactgctcgcccgaccagcgtgaatggaatggctttttgccgcggtacgccgcgggcggggtccgcctgagattgcggtgacgaaagggaaacgcggccttttgatgccatatgccaccacagtgcgtggtgctcccgtctttttatcaggcgagctcccctgaactgcagctagcggcctaccagcagtgagtcggtcgatggatggatggggcatgataaagcgtgcgttctggtgtctgcactttccactgtttgttatcaatgctgtgcgtcgaccaggaacacaaaaaaatggcacaattagacccatctggggggggggggggcaggaatttgtcagcaagatttgggctcgcaggataaaatctcgcatttcaaactgtacttgtatagaattgcttatgcccattacacacgtaaaatgacaatgggaggggaaatgttactgcaatttgtgagtttcaggtagtactagctgacatcagttacttaatattccttttattctaaaatatattaaccaagacatatctttttttgagaattacacagtaccctacccctgggccggcaaatcctggagagattaacaaagtcactacagacgcctcgctgtcaacgggtacgtcgcctaccacctaccactgaaagcacaacgcagttaaatcctgaaaaattcatttccatgggtacgtcgcctaccactgaaagcacaacgcagttaaatcctgaaaaattcgtttccatggggagtcgaacccaggaccttagatgctactgagacttttgtaaccactaggctacaagccctttcgcaacaaagacgtatcttgatattatgaaaaaaaaaacttgtttagactagtagtgatataatctatctaatatagtattagatcattatattttaaaaagaataaatactattactatgttgtgaatgaaaagctatgttaatttcaggagtttgcaatcagtaccagactaccagtagggatcttgttgcggatcatgcagtgggttagtggcacacaactccacgctactacctcatgacccatgttctatgattgtgctgttgcatgaactgttgtcatgtagccgaacataagcaaatggatggcagcgttgcgtcacgtacctgcggacgcatgcatgccgacctttcgatcatgagacgagcaaccggccggcactgtgtgcacacaagtaggagtaccgctgcacgcgtgcaacacatgcatgcctttttttgtgcttgcaagggaagcctctgacctgaacagcacagctgaacagccctgagctgctgtgcatgctacctcagctcgtttcgagattgtcatattcactgttcggattggtatccggccggttaaggcaccgagttcgtttgatgttcgtttggtagaagatgtggatatataaccggttccaggtttttgtcatttatattttctagtgttccactcaaacatgtaccaaaattaaaattgagttgtacgtatcatgtggtacatgtgttgtcgtcagccttggtttctttaggactccctccgtcctaaattataagacaccatattttcaaagaaaatcaaactcggtatttttgactaataaccatactaatcatttatatgctaaatattatacatattatatcattatatttatattttaaagtatttttatgtgatgttaattttatatttattgggaacataacatggaataaagtatatcattgtttaaaaaaatagtatatgccttataatttgggacggagggagtatataacttctttctgtttttggaaaggtattttgatgggcatttcaattaatgctttcttttaatatccaatacccctcagaatatttttttcctccatatatcacctaaaaagttatcagaaaattttaaaaactttgtaagatcaaaatatcactccataaacataaagtttaaattcataatataagtaaaaacaaaaataagaaacgcgattgcatgtttatggaggggatgccccattgagggttataaaagactttcccaatcattcctttattatgtgtttggttggagggacaagaagggtacggttagagcgaacccatttttcagagtatttgatttaggacatgtgggatgatatgatccctaaaaagaaatattttctctagatccgggtcaattccatacttaaaaaactggtagaccaatccaactcactttctctttctcattgacacgtagaccacatcatcccattctcaagaaatagtaccgttccacctctcatgcaaattaaacatatatgtggaaccatcccatcaaaacacaaagatgggttagattcgttccatctcattactaaaccaaacacacgctctagacaatacagggatcatcaacaggccggcacgctagattagctagggtgatccaagaagcaaatccgagcgtttagaactgaagacggtgttgcaagatgcaacgaaagtttttcggtggtggggaaagaacacaacactgtatattgctataaacgttaaaggcggcaataaggtagtcgatgcgtcaaagggaggtggtgtgcaggtcaaggatggaggcatgaggtagggagattacagcaaagcctcatcaacactgtactttgagaaagggaggttaattagggacttagggttaaagaaaggagggaggtggactattggatctgtatcgaatggtccaggattaggtatgctcgtatgcacattctataacgtttttctttatttcttttttggtgcggggtaaccgtataacgtcattaatttgatagtggattaattaaaagttatcaagactagaaaaatgcctttgtgttgtaacggatgaaaactattttaatcatgagctgtaattctgatcgtctcaatttagcatgcgagtttatatatatatatatatatatatatatatatatatatatatatatatatatagtaaatttgtttggtgctccatggtgcccgggcaccattgttgaaattgagtatatacccaattcaaatgagtatgaatctttttcaattacttaggtattaactatatatgggggcaccatggtgcccgggcaccatgatatcaaatacacaaaatcactcaaatttttcaaaattttcaaattgtgagtatatacctagttataataactcgattcatacctatacctatcaacaaaacaactcaaatttaactttatttcacaatccatgattacatacctaactaattatatgtatggatgctatatacctagaatcaaaatctaacaaaaacaagttcaaattcagttcaaacttgctttgaactagttagtaaagtagctaatgttaatatctaagtaattgaaaaagtttcatactcatttgaattaggtatatactcaattttaacaatggtgcccgggcaccatggagcaccaaacaaatttactatatatatatatatatatatatatatatatatatatatatatatgagtctcgtatttccaaaagcgaacgaacttaaaaaccgactcatacacagatgacgtactaaagtacggcaaaaacatcttcaatttttataatagtaatttcaaaagcaaacgaacttacaaaccgactcatacacagatgatgtaccaaactaccgacaaaaacatctttaatttttataatagtaaagataaagatatatatacttcctcagtcaaaaaaataaacatagtataaaatatggcatatctttagtattatgaatttaagatatttagatttgtttattttagaactgagaaagtaggtttctaacattctgttgccggccgcttacatgcatgcgtatggtgatgattgattcgtctcttacagctgagcacggaaaacagtattgcctattaatgcgaaatatttgttaaaaaaacttaaaaaataaactaaaatgattttttaagagcaacttttttatattaactttcgcaaaaaaaaaaattgcacattagctacttactagtaacacaaatgtacactagctgcgcattatcatatacaagtgatcgaccaacgcatgcacgcttgtatgcaatacgaacaataaatattacaattaataggcaacggccatgacttaatctcgcttggcctggcacagtattaatcaaggtataatgagcagcgggggtgtgtaactgatggtaatataattaatataacaaacgttatttctcagcacagtaacttatccagtgtggtgtatatatatatagttcatcatttcaagtactcccagacacagtgccaatcggacggcatagatactacagggaatatgcatgatccattttcttagctttcttatttatgaaatacttaaatatgtcatctagcttgattatgcttaatggatgaatggattaacggtaatgctttttgaacttttgaacgatgtaatttttgtaaaatatttcataaatttcttagagaactttataaaaatcaatctttcaattttataatagttaattcattcgtttctactcttgaataattatcacaaatcatttatctattcaaccattcagcacaaaagaacaaaaatatgccacggaaaaacaatgctaaaaataatagaagtacattgtagatttctaatggccacaagaaataacttgtgtgaatattagatcataaatattgagacgatcgataatgagaaataaagggaaagaggagatagcattatatagttgcatgtgccttatattgtgaaattaataaagtgaaaaaactatgtaatatatatgatttttttttcagtggagtacgcaccaatcatcaatttttatgctacctataaattaagtatcttacaccataaaaatcaatatcattttttggcaaaaatatgacaaagtactttaatttgcctcttttttttacttcatattataaattagaatcgtcagactgctgctcaaaactatccagaatgtaaaatggagatatgaaaactataatactcctacttatttttacttatggatgaaaaagcattcacaatgctattattttactaatcgaacctaggtggaagggacatactcccccctaatataagagattttgatattttgcttatattgtttgaccattcgtcttattaaaaaaattaaaattattatttatttttggaacctttattttttgtgacttactttattatcctaagtactttaagcacaacttttcgttttttatatttgcacaatttttttttgaataagatgagtggtcaaacagtgcaagcaaaatgtcaaaatctcttatattatgggacggagggattataatttaaagactactggtgtaatacttgtcgaccaaataaaaatactttcacaacattacaaatttatctatttacattaaaataaagttatcaggaacataaaattatgtgattttcatcctgactatattgaaaagccgacactgtcaaatcaaaatgagtagagaggacaggaaagaataataccaattttttagtcaataatgtaataatactatgtattatattattctaagagttagaaaagctagcattgaggtggctagagttttttctttttagagggtggttcgaagtttcaggtaatttgacattatctaaaatcgtaattaagcaaagtaacctaattgaaactctctacaatatctgtttttagaatgaaggatttctttttcaggattcactaaatgaagtgaaaacacctgtaaaatttcaacgtttttttcacccttttggatcgatcagagagtacgtcatggttacgatagctagatgcattgtagtacaccactagcatactaaacgtgaagcatgggtgaatgcatggtggtctgctatggctaggactgtaggacatggttgcacttgcacacacacccaaatgtagcatatcttatcttccttaatgagtgtagtgctacaagtagcagcacactaatttattaggacggccaaaatgcaaccacaaggtggactggtagtattcggcagccccgcatccctaggagaatgttttcccgggccctccaaagaatggtgctaattgcatggctaaaatattatcaatattttcaattcctagctagcgccgtacatccaggtagaagaagctacacatggccgcgttcgtatgtacatgggcatagtgaagcggtgaaagaatcattaggtatagtatatggcaactttctggtatgggcagttgaacttgcatccggggaaaaaaatctagagtaaaaaaagcccagcatgcactcgttgtaaacttgacaaaagagagatctcaagatacagtatgagtgcaattgtgcaaaggcagggtgcaagcatgatgatggtgatgaagagttagaggagtacctatatatagctttttggcccagaaaaataaatatatcatggtttgtaataggatagtacaaatgaccatgccgtgcactaaaacagatggcctaacatatgataatagtaccatgtggatggaaggtgagagaaagagagaaagttaaagtaggggcgtctgtcatacatactcgcgccatgccggcccttcttccctcctctcctcctagctcccactagtggctttcatggctggaagattcttgcctctgggatgatgatgatgatgagagacgattcgacatctcagagagtagctaagcctacctgccacaagaaaatagtatagcacagagtgcgagcgagcgatcgagatgacagatcggtatatatacaaatcagcatttgcatgcaggagaacataataaaaggatggcaaatataatcaatatattaatgtaggagtagttgtaaacgacagtaaattaataggagtattattacaagctgttcctcaaagttactatcatggtgtataaatgaacttactgaagccaccataaaaaatgactgttgctaggtgcccctctaacagagagcattgtatgctaaagcaccaggcccctcagtgatctatgtgagcttggtttaggacgcatatattgaactatgcaccgagttaactggaggtatatcaatgtggtttctgacgacacaagtggccattaattctgtatctctaattccccatcgattgaaatttctaacatgtcacctgtgcctgcatctgcaagatgcatgccatgcaaaaccaacacaagaatttggccaatcaatcggacatatgcaactaaccaacatgttgtttgttcagactacatacagtaactcaaacggcgtacgtaccgtccgtggacacacacacagccatcaaaactaaaaaaatgataagagtatcatgcttcagtgcagattctacatgacatgattaaatcacaaaatgagagattgattggtgaatagatcagcagctgtataatatcaccaagttcaccacccttaaaaatctgtgtatcctgctgtgttagccagcccccaagccgataattaaccacacacacatgaacaaacaacaaagaagcaacaccatgaaaccgaaaaaccaaacaaagcaaagagaaacaaaacgccatatgtaacactaatcaccacaggcttattaaccccccttgtctctatctcgtttctctatctccacatgctgctagctgctgaccaccacgcgtgcatgcatgagccatgcatggcggcggcgggcaagcagtagcagctcgcaccaccttaccaagaaccgccgccgccgccgccattgctgctgccgttgccgatcatgctgctattccagaaccctggggcctcatggccaccgatgacgccgccgccaccaccttggttcttgccgtggtcgtactgatgatcgccgccgctgttcgcgtcgccagccgcggcgctcaccaccggcttcaggtcctcgaaggggaacagcaacctgcccgccgcgctctcttgcaacccagcgctgcacgcgccgaacaccccggagccgccgcctgcacccgcgccgtgcgtgtccagggagaaaccgagcacggtctgagcttgttgctgctgctgctgctgtggcggcggtggcatgcggaactcgccgagatggaaccccgcagctgcgtactccgccggcatccctagcggcgccatctgcggcagcggaacgtagcagccggtgctcctcagcaactccatcgccgagaacgcgcccacgctgcccctgccaccggcgccgttcgccgccgccaggttgcctccggggttgcacacgctgctgctctccaagctcgggaacgccgtgaactccggcggctgcagggcgcggccgtggtggtgcgggaacgctaggttgaggtcctgcgctccctcgtgcatcagcttcgggttcttggccgccagccccacggggaccgagccggacaccgccgcggaggtggaggccgacgcggccgccgacggcaccaccgaggacgacgagcgcttgttcttccgtgagccgccgccgacggggacgttgcggagcgagccgccctccgtccagtagcggcggcacgtcttgcagaagtagcgcggctgctggaggctgtagttgttgtagtagcagaacttggtgttcgtcgagttgcaccgcgggcagttgagcgccttctccttctgcggccgcgcgcggcgctccgtgccagccccagctccggcggcgcccgcgccggcggccgctccagccgccggtggggcgataggccgctgggcgctggccgccgaggacggcggtggcggtggctgatttgagctcccattaggatttggatttgcacccatcagcatctcttccatgggcttcactagccctagcccctggtgattgacacatgtcgttgcactccattagatgttgcaattgcaagtatcaacacaaacctagaactaagttatgcaatactagacaattagcaagaaccaagaagcaagaacatgtagtatatgagagacgaatgggggaagatgaatgagcatgaggtgtgatgtgagctaggatccttatggtgcaacaaagaaccaagcaaatggatacaaagcgagattaaagctagaagagggaaaggtgaaagatagaaataaagcgggaaaaaaaaagcaaagtaaagatgagagagaaaacacaccaccacacaaaacacacaactttgtttgtgctcttgtagggttgtgtttgtggcgtagcagtactgctgctgctgctactacatcatcctccaagacatggctactcttttgatgcaaggtgtgggcttgaggagagagacgaaagggtgaggggtggagagaaaagccatgaggaaaagagagatgaaaagataaaaaggaaagggaggataagaaagaaagcgaggaacaaaggaaaagaaaagcggtgcgtcgtgtgctcctttcaaggattaaaaggggaaggagaggagggagcaagagaattaaaaggccccaaacaacaacaacaagagccctcagctcgaagccaatggagaagacagaaactaacccacatacacacagagcgagaagaatatggccgatccgtgcatagatctgcacaaagaataaaaggttggccatggcggttcccaagagcaaacaaagccgagagagaatagagatcaccgtatcccaccagaggaaaagcaagcgccaagatcaaggcacaggcagattaaacaagaaggatcgaccaagaaacacccacatcaacaagatccagaagaagagcagaagccaaaatcgacccggccgggcccccggtgagagatcttaattgtagacatgtcgccggtgttgcatgcaccgattcgagaaaggatcgagcgcagatcagccgccgcagcttaattacctgatgccagtgggccgcatccatgcaagaagaatcccaattgctcgatcctcgccaacgatttctcgctatcaacacaaggagaagagagagaggcaaggaggatgaggagctcctggatgtctcgagtagctagctgcaggcacgagtcaaggagaggaggaatgtcttgtggatggcctcaattgaattgctctccctttctatctctctctcttctcatatgtcatgagatagtgggattcttttcccaatatttttatgtctcttggagaggagaggagagaggacggatgtgagggaggaggaacagcaagggaaattggtgcagcagcgtgctgtgcttgcctccgtttttggttgtaaattttttgttctggctggctggttgagtgtgccgccacctgcgtgcgtgggccgttcgcaaaaccagtcggtgggagtagtcaacctagcgaaggaagccgcaggcccgcagccgcgcaggcagggggagagaggcgcgcagccctacgaatgatggtccgtggggccgtgcacgtgcgtaggacgacgcgccacgtgcgagccaaaccaaccagggtgtttttagcgcttagcagtatgaagctgcgtatagatacttgaggaggggtacagatcagctctcaacagcaacgggcaggatcaaattcattgcgcttttaaatatgacttggctcatcagtgctacctgcttttaggtgaagtgattacatgatgttcggaactatgtcaaggaaatttttaagagggaccagctgactttcctaggtaattttacacgaagctgtagaattagagttgatatacaactctgagcttttgtttccatatagtatgtgtttgtgttttgtatacaatcgatttataaaaaacagaattagatttgatgtacaactattggaatctattttcacaaatgagatacaacgtatttcatatatgaatgactgtagagatcattagacatgaatatatgatgtacaactcttactatatcgatcagtctacaccatagcattcctacttaaatcgataataggtcgatagttggacatcatacacacttgcaaatataagctgcaatccactgttactatgtatttactctatcaaatacgggttgctatacctcatagttccgttagaacggtatgataccaatcaacagcaggtataagattctgatacctcatcgacactagccaatagtcgtcgatattagatccgataccccatcattatcacttgatagttgtcgagatcagatctagaacccatagtaatagctgatacttgttggtactagctgatacttgttggtactagccgatactgcatcggtatcatatcgataccttctaataccagataaggtaccagagtatcaattcgtaatatttatatgtttcgatttcattagcatcgcccttcctttatcgatggaggtggccactacctccttcgatggagacagccgcttcaacccctatcctctcttggcgatgacggtgatgatggtctccccacgacaacgactacgttgccactctcctatcctccatcggcacagtccttccatcctctcgatgcgatggctgaggtttctctcatcctcctagtcatcgtgacagtggcttcggtgatcctcgcccttcctaggcaagaggaggagtaggaggaggcgacactacaggcgataagcagctaatcaactagatcaagtggtggtttgcgcatgcctcccggcgtatggggggcagacccggtccacaccttggaacgggatctccgtctatagcattttcgttatcaatttttgcctatataccgaatggacattcagataaaaaaattgcatgtaaaaaatagtaaataaatatgaaaatataggcttgtcattaattctatatttcaatcttataaagttaatgaaatattaaaaatcaagatatcaatatattgaaacttcacattatcaaacatagaatttatgaactattaagtaatgaaaatatttgtaggaaaaaaatgaaactactaagattgagacccatacacaatgcaactttgatcttagtaattcccaaatctatatattgtttgattgatcgtaaactaaattaagacttcacagccactccaaatttgtattattactaattacgattttggtattattatattaagaaaaaaaaattaatgagaaaagtcttagaattgattgtatatataaaccgcatgcgcgcggtttctagttatcaattggtaaagaatttttatgatattttttagttggtgtgtagaaaacttgtatacataatatatgtttccatgtaagtagaccaatgactaatggtaacaatgaaacctccacttggcttagtgctgtaaaactagttttgacaaagatccaaattttctcaccaagcagaacctactagccaaccaattaactagttcggccatgtaataccaactgggtgtgttcgagagaaaagataaaaggaaaatcaagaaatacgcaaaacgatgtgacatgagcgtatgattagttgactgttaattattttaaaaaaagattaatatattattaaaataactttttctatataattttttttgaaaaaacacaatatttagtagtttggatagtgcgtgcgcggaaaacgaggttccttacttgtcactaacacaaaaacaccacgtatgtctactattagttgggagagaagtaataggtttgagtgggttagtgggtggaaacaggtggacatgcgaaaacgaaactagtagcagaatgagccgggagtccggcggtgaattctcgtggtaccggtacgtatggtcgatgtccgttgtagtcgcgcacgatgtatatacggacgggaaatcccgttgctaacttgctacaggttttaatttgcacgccctagctttggtgatgggtgatgtggccgacgcgtccgcgtccgcctccggtcaatccacttccgccacacgctgacccccttacgcgcgccagccaatgcgatcgatcgaagcctcccgggcgtctcggccagggccccgccccggcgaatgcacccatccatccgcatccgcgcgagccaacggcgcgacgccaccgcacaccacacccccaaccccaccgtaccacaccacacgcggtgccgtgccacgttggtggtggtggcgagagatcgcactcggcgcgcgggaagggcgggagggatcgatcgaaaccgatcggtggatcgatgggagagccagatcgagccgcccgcgcgtgggaaggggacccgctcgctccgacaagggctaaagcggccgcgcacgtctgcgggggcggtggcagcccaccccccctgcctgccgcggcggtgagggcctcgcgccatctcacgatatcgctatcgctatcgctagtgcgcgcggatggggtgggagctgctcctcctgctcctgccgcccccgcgcgcatagtccaacggtgaatgtgcgtgcgtgtgcgcctgctagtgggtacgtaccattattgttgttcggctgccaccggcgaatggatccatcgaaattccttcgccgtgtccccattcacccacgacagcctgccgggtgcagctaatatacctagtactgtagctcgtatagctgctagtaccaccacttcccaattaatttggctgctcggatggagctttgcaggcaggagggagtaataactttggtatactactcgcaaccgagtctgttttggctaggtgacaatttttattttggagaaaggcgaaaggggaagaagcggcggcagcaacaacagatggaagagctaaagacacgaaaagaaaacgagcttttctttctttctgaactcaacaacgagcttttgttggatgatatcggttttgtcccctttttattaccttttcgctgtcttttctgcgaattcgtccacagttgatcgcttccggccgtgatagccctttttgagaccttcgcttcgtgtgagcttttgtcagtagcgtccaaaagaaacgattcatcaaaacagaagactctgcaaagtagtaattagaagcggtccgtgacaaggtagtacgagggcgtactaatctctcgctgatcaaacaaattccccttttcctcccccaaaggcagaagacgagtagaaaccaccttttgagaatgatcacaacttccctcgagaccttaattagtcgcaaaggtggtgacaactgacaagtatgaagggaataaaggtgccggcgattacgcgttcgctttgagcgattagcacccgtttagctaagcagataagattaaaccagtttgttatgatgacttgtgctaatatatttgtttacgaaggtcggttctactcctttctctttatgcctaggacagtaggagtagtatatttgtcacgtcgattaagtagtccttactttgctcggttgaattttcctctacgtggcccttttatacgtgactaatataaaacgcgaataactttgcccaacgaaactaaacatctgcccccactatccatccatcttctcacgctcataaagtcacaagctcattcagcgcacacatcgcagccatcattgttcatacccggatgatcacctgatttattgctatcgctgatggtactcgacttatctacgtactgatccagaagtggtagggggtaggcgcaggatagcaagcgagtgccacaaaacatttgccacaccacaatgcggcagctcatgcaggatggtcatgtcaggtcagatggcgcgcacacgtactgaatttcggggaagggagagagcagacaagcaggcaggcactgacacccactatgtgccgtgacagatcgagcgagctagccatgcatctttacggatttaggctgtgtttgtgggagataggattgggaagatcgggaagagacgcaaaacgagttgagtcattagcgtatgattaattaagtattaactattttaaactttaaaaatgaattaatatgatttttttaaacaacttttatatagaatttttttacaaaaaacacaccgtttagtagtttgaaaagcgtgcgcgtgaaaaacgagggacaatctccctatctccactgaacgaacgcagccttaatgaagctgccgtctcctcagccaaaagccgaaaaagctctcgatcgatcgatcgatcgcgctaggactagctaggccggagcacgggtttctgctccgtcgcgtcgtccggctagctcgtatagctatcatcgcgccccgaccgaccggtcgaaagtgggctactgctataccgcctgctgcttgcttgctgcgcgcggtaggtgcgtgctgctccgtgtccgccgcgagcgagagcttcctccactcggcggatggagtagcttcgcatgcgcgccactgtgctgttgtctcaggcacatgtgatgtgcaccaccgatccactacccagcaccctgcagcgcaggcatcagaacaagcggacgtacggattcacggcaagccttcgagcttggccgacctaggctctcatggggttttgagctacgaggaaatttgatacagcatagtataaggaccccctttgaatcgaaggaaaaaccacaggaattctagaggattttatcctatgaaaaataatccaatagagtcatttgaaacaaatgattgttttctattaattcctttgaaattcctatgaaatgaaccttactagagcaattttggaggaaaataagcatgaggtctcacttcatgttttcctcttcatgtgtctaaggtttctgcgtttttcctatgtgctaatcaaacgacgacagtttgaagacttttctgtgtttcaaaatcccataggaatccaataaatgtggcattcaattcctatatttttcctattcctctgttttctcaatcctgcgattcaaaggggccctaaatgattttaaaagaatgttataaatcctaacatatttaaattcgtactactaacatgtgtgacattcattcaaataaatctcttatattatggatagagggagtacacaacacagcaaaagtttatggtatttgtaacacctcacttaaaaacatcatcatacaagaaagaaaattttaccataaagtcaaatgcttatagccaccttagacgcccttattgctgccccaaattctagggccttgaagagaggatgagagaggatgggaggaggaagagtagtttggttttggttcaggacagacctagtcgcaagcgggatagaattatctttttcacgtggtatttttttcatttgaaataaaaaataataaatggcagtagtgcccacgtctagttattaatattttctccaacaaccatgtcatgtgttttgggtctcctgtgacaagatcgaccataaattttggatgtattttgtcttaaagttacggagtctcataacacggcactgctactcctacctcctagttgatgagtctactctaaatgtacatgattattataccatttaccggacttgatttgcaacgatcaggctttacgctatgttattttaattattcattagattattgaaacagattatttcttctatgtttttttcaaaaatgttttctcaaaataatacttttttgtaaacaattatttaattttatttatcaaaatattataatttatccctataaccaggtagagaattcatgaatgtaatccacttaatctaaatcaaacggacataaagtatagttcttttcccttttcgacgatgaccaatttcagtattctattgtcaaaccctattttacacggcctattattatttataggatgacttttttgaagtttgatacatttaaactaaggctgtgtttaattagttcgtgtgcgaaatttttttgaagtatacggacacacatttgaagtattaaatatagactaataacaaaacgaattacagatttcgcatgtaaactgcgagacgaaattattaagcctaattaatccgtcattatcaaatgtttactgtagcatcacattgtcaaaccatggcgtaattaggctcaaaagattcgtctcgtgatttacatgcaaactgtgcaattggtttttttcattcacatttaatgcttcatgcatgtgtctaaacatttgatgtgacggaaaaattggaagtttaagaaaaacttttaaatctaaacacagcctaaagagttcacctgtgtttccaatgctttggattatttaacatggattctcaatacaatctacgattttatatattttgattaattaatactggtggattgtcccggctactttggatggggttatgataaatagaattggatttggtatacaactcttttgattcataaatataactgtaatatacatcaagtcaaattggattttatatgcaaccatagtatatattttaattgatacaattctatttttatatagtagtttttaatagtatggttggatttcatataaaactcttaacttctatttcatagattttgtgctaccttatcaattgatctacacctctatagttaaatatatcatgatcggatggttaatatgtttctcttttgataactggcttaaagtctgtgtgttgcaatggaaaacaaacacacaacggaaaataaattgaatttctagcttattaaataaatcgttatgcgcttatttagtccaagtaatactatattttttcttatttaacaagtagatgattttgaaaattagaggagccaatagtaagtggtgtaatagtatatgtcagtggtagtggtaggttggtgtggaaatggataccaccactacgaattaacatttttaagtagtatagaatatgagaactatacttagagcgaacgcattgcctcctttaattcctaactatctttataaaaataatctagctagataggtatataagcttctcaattgtgcaattataacgtattaacgcgcgtggccataatatgatcgacataaacagtcggatactaacatggaagttttctattaagtgaccgattcatatatgcatttacttttatgtataactaggaaggtagccacgcgttcgcgcgggcatgcgtcgtacgctaagtttgaggtatttataaaagcgatatattaacaggagaacatctgccacgatttctccataaattatttttgtcagcattaattaattatttaataatattttaacctattagatttatattatatcaaatataagtaatatcaataagtaattatttataatcttcttcatcatttaaaaagaaggtagatttattttctttagaaaacatgtcaacgaaagtaaaagtaagtgtaaaaaaaattaaggtgtttttattttttatttgtataatatattatcataatatgttaaaggatgaattgggtgggacattaagctacacgaaaaatgcacgagtttatatagcctaatatgattgatatattttgagaggtgatctacctatgaacatttcatgtagagtgaatgagaggctccacgcaacctagcaggaatacaataacgacaaaatatcattgcataataatatttttggaatgtcatgtaccatgaataaacacttgttataaataatggttctaccggtttaaaaggtataggagcagacatgcatgttatgcagtgagccagacagaggttctgatagactttgttttttttaccaaaagatagatatgatggtataaaaattgggtccatcggtttaagtggaaaccgatggtcgattatatgagagtttttgtaattaatagaatgccacataacaacatagaagtgtttataggagtggtaggagcaatcatatgtatgatttagatgctatgatcattttaagatcgtttatttatcttttaaaattaaaatatcatttatttacaaaagcatcaagatcaattcgtatatctaaatagcccccacgtgtatgttgtgagaaattaatgaagttttttatgaagaaattaattaagttggtagaaagtcattagatgtctaacaatgtatttttaatgggtttaacagtttcattaaaaaataagctagcatatttttattttcaatgacaaattttagtattttcttttatttagtggagcactcaagatggatgtgggtctagaatgcaataaatccaatatagatattaaaattttatatttatttgaaaaataaaaatagatatataatttatggtacaaataattgtaaagactcgtaaaattaatccggcctttattaaaaagtctaaaatagcacgtttaagtataaattagttaatatatttctttgttagtttaatgcgtacagaatgtagcggtataaactttataaactttatgctccacataaagggttcacatatacctttatttaatgggtaaaaataaagggtaaactttattaatttgaaaataatgctccacataaagggttcacgtatacctttatttaatgggtaaaaatatagtagtgtaaactttattttgaaaaaagatatatcataatataattatataagttatgattatataaaatttaactagattatatatatatgaaaagaaaaaggagggaaggagatggaaccgtaagtacgtacgtacctacggatggtgtggaattgtacgttttaagatcaatctagctaatctgacggtttctaatagtggacccactattttaagtaaaaatcaacgaatagatgtttttttttctcagaatttctttgatttctctaatttattagagcgttaagtggcggcttaggaggtttgtaggaagattaatggacttttagtatataatagattagcattttgattattccagatagaatgtaagtatgtgtacaatattcacaaaatccagtgtgtttttccagaatggttattgacaacctttaattaaacatacacaactattaaccatttgttttgtctgtatggcaagggaattagccagcgttagatcccactttagctaaaagtataggagacccactttcggactagcttagtcgagctatattattaattctttaacttcacttatagttgatgattgcaaatatagtactctgaacctgatcgatctatccatcctgaaattaattaattgtgtgacttctgatttaacccggccacacatatgactttattttaagtatcatgtccttggatacaactagccttcaactttggagtttggacaagaagatattgctgcctttatcttacgtcaattaacagcctgtggctcgttcctcgacatggatgtggtggttttaccgtatccggtttttaggttggagtgccacttctgacttaagcttgtgatttgtagcctagtgcccaagtcaacctgcatgcatatataggagcattcctcatgggacgtgttgcatgttaggtggaaatggtgggatggaccacaaaaccagctgaagttgcccaccgccctttccacaaaggtgaaattgtccaaacacataggtctcccttgaaattgtcctttcgagttgtttttgtctttggccggtggacatgtaccatctttgtatttttgacatgtacatttggcaatattatgctgcattgctataccgaactcaatacaacattaattcaagaatgctagctacatattcacacatcaaagtttgtttctaacagtagatagaactactagatattttagattcaagaacatggtgaagcatgaagcattttgcaacgcccgaggcagagatggcgggaaacggccggagcccggagggaagcgcctacatcctcaccctgaagcggcaacggtttggaggaagatattagtggcagtggatacaaggtcgagagaattggtgacagagactagcaaagggtcagccgacggcggctacgtcgaagcctggcggagattgggctgttgggcaaacaagctaagaggatatccccaatagtgttcgtggagattagcaacatgagaggagccatcatggaggaacggcgtggaggccatgctcgaacaagatgactgctggtgagtcaatcgcccagaggtagagtgacaagccgtcgacggaggtgtggcggtatagagagggtgtcaacggcgcgtactagattatagtcggttggtggagccagcggagtggacgggacaacagaccatggcggagtcctgccgataaagataatgcccttagtgggcagcggctgtgcagatccggtgaagtttggaagagagtggacggtgtttaccaaccaactagcgaagatgatcgttgcaaagaggggatgaggaccccgtccccgtcgatagcagtgctaggagatcaggcagggccaggggcggagccacatggtggtccgtgtgggccatggaccacagtaaaatctggcccaagtgccaattacccctgttctggtccaaacatagaaaagaatgatgcttttatttcattagttgatttgccttatcgatttgtcgttccagcttccgtccttcccagttcccatcctaactacgccattgatcgtgcgagtgcttctttcgtaactcgacgactcaacgcttgggattggggacctgtgtccaacagcggcaactggcgtttggcgaccaggatcaagagcagcgttcagcaagtagctatgtcaccatgtcagtttcggttcgattttgggaattccaattagaattggattgataaattaaagcaatgcataatcctattgtagatttgttgaagcagttctatgcttgtatgttaacatttatagtgttcagaaaaattatgttaagttagaccaccctaacctaaaatcctagctacgccactaggcggtgctgacctcagccccaagcagtgctggtatggaggaagcccagaccccggtgcgggaataagtacgctggagatgactagaactgcattatcatagggagctgagcatgaatctttatgtacatccaatggtcacgaattctactatacatttgtaaatatcttaaaacatcagtgattgtttagcaaaaccataaatatgaaactgttaatagtgaggactgcacatagcacagtcgattaggcaccggggcgtgcagtaggccaatcgtggtttcaatccacggggtcatctcatgaacctcacctaagaaggtatccactctttgccattgccaggactaactttttggttagttctgattaggtaaggaacacatgtgtgcatgtttagtggattgcatacatgttactggtgcactcaagactagagcctccaatctctttcaagcatgtgcttgggacaagtacacatgttcgcgcgttgttgcacaaatataacgtttgtctatgtacaatttgttataaaaactgaccccgatatagacatcagtagcataacacggaagaacatcatagaagatctaaacttgatgacaatgtgtggcaaaatatttgttttcttttttgttaacgggattcaaccaaaacttatatccccagaacaatacatgattatgtgctctccttcctgatctagtataattatagttgactaaagttgttcatagaactacaattttagtgacaaaattatcgacttggtttaacattagtgacatatttcaattagctacaaattatgataaaactggaaccctttaaaatctttttattattgacaaatcagacccccagcttgtagattgaagtgtcatgatgacgtggctcaccgtttcggtaccacgttttgatgggttctatcgcaattgcaattttgtgataatttcaaatattattatttcacagtgagagccccatcgtaacatgaaacagtttgttattgttattgtaatttgacaaattcaatgttaattttcctgtaaaacaagcagtaaaagctccccggaaaaaaaaaggcacataagctactagtgctagcttcgtgctgaagcgtaagaacgagcctgtacaacttaggtcttgtttagattcaaagtttgatcttcaaaagtttaaaattttccgtcacgttgaaatttttctacacacataaacttctaatttttcattacatcgttttaattttttcaaacttttaattttgatgtggaactaaacacacccttatgcgcatagctagcaaagatcggcatcggcccgttacgtgtcgcgatgacgccaacgccagtgtgcacactcagttgcggcgacgacgaaattgtcaccgcgtggtagatggatccgcgaggaaatcccggcgggtccccggtgttgtctaatcccgtggcacctcgacgtggactgcacgcttccaccccggcgaggagtgggttctcgcatcaccacccgcccggccgagtccccgatcgatcgatcgatcgaaatccaaacgcctttctcctcctcctcctcaggctggccaactgccactttcacctcatataattaagtaccatgacgactctgctagctgctgaagctagcctgcacgttgcatcacgcacagatcggagtagtagtactatttttcgtgttattgtcgtcagcttattccccttctcttcttcgtctctcctggaattgtcgctttgctgtttgggtccttgtgaggcggcgacggcgagagaaaaatatgagcatccaggagcaagtgggagaatgagagtaagtggccagaggacaagagtggtttgttttgtcctatcctgcaaaaatagtggttggtcaaacgtgatggtcgagctggaagtcaagtatggtccatgcatggtcaatatttttccaccaaagcgtgttatcttactgaaaatttaccaacgttatgtaaacacaaaacaagtactagtacaagaactgcagctgatggtgcagtgcgtttggatcgaatctttgttctcttttattaattgttgacttcagccaatcgaacaatcacaggtggatcatcttcgatgactaaaaatgttattgggagaatctcactcaggcataaatgtctaacctcaggagtgcggacattgacattttgcaaccctggcgctgaaacagaaaacaaacatcaaaccactagtcctagcctattgtacaactcatcaaatctgaacagaaaataaacgtcaaaaatacaaacatcgagctaggtgatctcattgaacactgttctcaatttcgatataaggtatacagctgccgatcaagatagaacggtcgtaaagtcataatctgctttggtatacgagcgttcttgaaagtcaatgcatacaaagcgcctgcgtcactttcttcccagaacatgtcagctagccagccaagggcgaaacgcgacagtactatccaggacctcgcgaagaatgtactacagggtacagacgaaagtaccaagcgtctgcgactagcttccgcgtacggcatagcacaaaaagctccctcgcttggttgacagggaagttatttggaagtttgaacaaaagttgatcagtactaatcgtatcatcattaacatgcttttgagcaagcaaataaggtcatggcgcatgcatcagtgcatgaccctgatgacaaaacgatggctagcttcaacgatacgatacgctggttgccttttggtcgggacacaaatttgctccaatgtacctcgtgttcatgtccatgacattgcatatgttcaccttttttttttaagttgcgttctttatcacctcttcccaatttctactcactcaattttccacgtgcacgttttccatacagctaaatgatgtatttttttaaaaaaaatcctatatgaaagttgtttattttaaaaaaacatattaatcatttttttcaagtttatattaattaatagttaattaatcatgcattatggataactacgttttgcatgcgaggaggtgaagttcccaaccttcacttctaaacgcaacctaagactcgctctccttaatactcttcacaaatgtcaaaattacatgttaaaacagtacataactttaaaaatattacatttgaattatagataaaattaaatacatgtgagacatactaaaagaaaagcatcaaactagtggattgcctcatgcaacttttcgcagggctagataataatagaattcaatttgctacataactctcaacttttgatcttataattacgattgtatgtaatttatatactgtagattttatgaattaaattgtatttgatatacaacttttagcatatactagaaaaattgtccgtacgttgcaatgggtgaaggcaataataataataataataataataataataataatattattattattattattattattattattattattattattattattattatatggtttagttaagataacatttactgtgagaatttgcttcgatatgtatatttttagaaaatcatgagatgtagttaggagtttgttcgtcttaggttagcatgcaagtttttttaaagagatttcttatatgactctgtatttctaaaagtgaacgaacttaaaaaactgacacaaatacggatatgtatttccaaaagcgaacgaacttaaaaacttacttatatacgaatgacttaccaaactatcggcaaaaacatcttcaattttataatagtagagattactattgttatatggtttagttaatgtaaaatttaccgtgggaattcgcttggatatatatatttttagaaaatcatgagctgcagttaggagttcattcgtctcaagttagcatgcgagtttctttaaatagatttcttatacgactcattttgtatttctaaaaacaaacgagcttaaaaaaccaactcaaataccaatatgtattttcaaaagcaaacgaacttaaaaaccgacttgtatacggatgacgtaccaaagtattaccaaaaacatcttcaatttttataataaaatagagatttccatatattcagttgtattagatttcttatacaattttaattagctcttgtttacatagatacaatcttattttgtatacagctttattaaccaatttacactattataattcacatctatcaagattagattgttaatatttatctttttctcatgagagtaatatatgatgcctatttttcgagctctcttgataataaactagtagggtggtccatgcatttacgtggctatattactaaagctacaatatcaactcatattatctttatttatatcatcatcgtatttttacacttatataaaagccgcacacatacatcacacgtgctcacctgtgctcctagcacaggctcaaagaaattaatggagaacagcataaatctccaagctcactactacttttttttattgaaaactagcacacccgcacatgtatgatattaccctcacgttttcatcgaacaattaatgctgtgaaattcttaaattagtaactttgctaaattaaaatttgacagtattgtagcatcgataatctgtgaacagcagctgtaatatcacaaccatgaggccggtgatgaaaaaaagtttgtgttttcgcgccaagcttcgaacgtcataattaattgtagccatggtatatattcctttcactaacttctctatttcctctagaagagctctgcccgtgtgcagtttgcaccaatctagcatcgacaaatagaaggcgacgtagaaattcttgtcatgcaacttctgattctcttattgctgcacatatttttatccttaaaccgctagttgggcgacgataaaactgggttgagaggctgaggtggaacgccaagttccaacacgagtcctcgactgtcattttcgcctcctcaccatctccacttcatgttattttatagtaacttagtcttgaggtagtacatcaaagaatgatacggcacatgtcatgatgtcaagactaggtcaaatcaaatcgcccgcaaatctcaccaaacacgcgtaaaatcgtcgtcaaatttcaaatgtatactacgtagctcctttcctatgtataggatacacatcaaaattgtagttaacccatttttagctggtcgatcagcatatattattgacaaaaaaataattgtgcaggatatgtttttttccattaatgcattcaaaatatttttcatatttatggacaaaaaagaacaacaagaggagcattctgaaaagaaagtgtgctatggcaaattatcatgggtcatagcgaatgcttgccacggaaatgccccaattgcttgaagccttgaacaaagtatgaaaatttttagctttaagtaaaaaccgtgaatcggatgcacttctacttagtcctatatatatatatatatatatatatatatatatatatatatatatatatatatatatatatatatatatatatatatataggacactcatatggtgcccgggcaccatggtatctaatgcacaaaatcactcaaatttttcaaaattttcaaattgtgagtatatacctagttataataatttgattcatacctatacttatcaacaaaacaactcaaatttaactttattttacaatccatgattacatacctaacaaattatatgtatggatgctatatacctagaatcaaaatctaacaaaaacaagttcaaattcagttcaaacttgctttaaactagttagtaaagtagttaatgttaatacctaagtaattgaaaaagtttcatactcatttgaattgggtatatactcaatttcaacaatggtgcccgggcaccatagagcaccaaacaaatttaatatatatatatatatacatatatatatatacatatatatatatatatatatatatatatatccatgggtcttctcaacgtatgtactctcgagaagcatttcagaaacttctatcttatgtgcttctagaggctatatggaatatttttggcttgttgccacgatgtggtcttaaaggcagaggaaccatccgttccaagagtgacacaacaatgtataaagcgtacgacatgtaatttctgtttgggagaacacatcttcttttagcccatccgctccttctaattccgtcttctctactctatattctcaaattctcataattttagcgagctatacacagagttcacgtgggaacactactgccaacgcctagagccgtagccagaattttgctaagcctaggataaactaatgtaatttacatactttttcctttatcttacatattgttgccttcatattgccttcattttacataaacgccaaattgggagttggggttccttaagttgaaggtggaacctctttgaacaccctgcctaaatggtaaggaagatctagaaaaagagcttgcagttccttaataatagactcgcacctgacagaaaactatcaaatatataaggttgaatgatgggaaaaagaaagaagaataagcttgaacttgtaaccttatttttcatatagaagaaagaagaggaagagtagcattttgtctttagactaatctgtgtccttagtcctaagctcatcttccctaggctctggagtagggctatagccatagttgttatactcctatttccatcactacctacccccaacacacacacaaaccaagtgaaccttcaaaaggaaaaagttaacagtgtatgaaacattacattttgagcttgccaaattaagaatgcaatgagagggattacatcgtggaagtgaatcaagaggtggatttctcactggatcaaatttgcctaaacttgaagtatgtcaaaatattacaaaccgtatttttttttaggatcgaaacacaagaactaagcctatcagagagggtgaatggtaggaacacaaaaaacgggtcaaaagaaaccatcaatgtggagattatgggtaccccatacccacacgacatgattatccgactgtttataggggataacttatatctatgaaatatgtaacagatcatgacttgggtattacgtttccttgtatattatggaacggcctaaagtcctggtttgacaagattgtaaagtagatttaggaaaccgataccgtattggttaaggtttctatcttgtaatctcgccccccatcctatataaggtgggcaggaggccctctaggggataggagacacaacctgatcgtcagatcaataacacacccggcggattcaaatccccaaacaggagtagggtattatctctcattgagatggcctgaaccagtctaaattcttgtctccgcatccatccacttttaggtctcgtgcgctaccccttttattattaccgaatttatgtttctacagttggcgcgccaggtaggggtgcatcgagtttcccgtcgaaaggtgtgatggaatcaacttgatgagtcgctcgcttcgtcttcgctttgggatcttttttgcttcctcgccgccgacgactacaacaaactctcgctctttgacttggattcaaaccagtcgggagagattcaatttagctaaggaggagatgcaacttccgtatcatcttcatcaacagcatcacgcctcgccaccgatcgatctccctccgatcgcaggaggccacatccacatctcccgccagcatcgtccgcaatgacggcaggccaagctgcagacggtggtcggccttgtcgccatcctctacggcacggacgcctgacctcgccgatctccccgatgcccatgcgcacgcgacccgcgcacgacgcccaagcgcgagcgtcgcctccgtgccatgcatagcttatggctgggagatccaatccttacaccatagaccatggcaacgtggccgaccaatgaggtgaagacacatcatcgccaggctacaggaccatacaacaccttgcaacaggatcttggctaggagtgctctgcacgccttaattttttcatctacacatatacatgtgctttaatctatgattgcttataagattgatttctccttttttacatgtacactcggggaacggcgccgcatgcccggggacttcatcctttgcgtggctgacgcggcccgactacccccgtggcacatgcgtccgaggcatcacgtcgcatgcccgggggcttcaccaaccggcttgctttcaccgtcaccgactggtgttttcgcctatatggttggcggacttcgccgctgtctatgggcatcatcatcgtcttcaccgactggctgcctcatctgccgccaactggtgtcctcgcctacatggctggatggtcacaccaccattgttggcatcaacatcttcaccgaccagccgcctcgttcatcgcaccgactggtgttttcgcctacacggttggttggtcacaccaccgttgtttggcgtctacgtcttcaccgaccggctgcctcgtccgccgccgactggtgtcctcgcctatacggttggttggtcacaccatcgttcatgggcgtccacgtcttcaccgaccggctggccttcaccgccgtcgactggtgtttccacctgcacggctggcctattatgccgccgttgttggtcgtctacgacttcaccgccggcctgcctccatcgccgccgactggtgtcctcgcctatacggttggttggtcacaccactgttcatgggcgtccacgtcttcaccgactggcttgcctttgccgccgccgactggtgtttccgcctgcacggctggcctattatgccgccgttgttgggcgtctatgacttcacctccggcctgcctccgtcgccgccgactggtgtcctcgcctatacggttggttggtcacaccaccgttcatgggagtccacgtcttcaccgaccggcttgcctttaccgccgccgactggtgtctctgcctacacggctggcctattatgccgccgttggtgggcatcttcgctttcaccatcgaccgccttcgtcgccgtcgactggtgtcttcattgttgttgatggacgactttattcccacattggccacctctgccatcaccaaggggaatattacaaagctaagtcatcattaattttctttatatgatatttttcttttcctctgcctcactacatcagctggttcgccgttgactagtgagtcgggggctacagatgttatatcatatttccttaacaatttttataatatttatcttgattgcttgcgacataatctgagtacaaaagtgcctatagagttatggagttctatcttcctatgctttccgtttggtttgtcgatggatagttgcctttgggccaattcctagcacctgagggctcgttggatagatcgagtaacgcaaggtgctaagttttaatcggaagaaatcaaaagcatagagataagataatttattttctgctcttaacaattgcaaaagtacccaagtagtaaactccgatccgtgaaactttgttccattaatgacgaactcatgtcactcgtatgcatgtttgggaagtgcctaggccgactcccggtgcgcgggggctatgactagtcgggcagagtgtttaaaacgtaaggattcatccgctcggggaaatcaaaattgacaagaggagaaatacatattcataaacattttaaaatgtttgaatgttcctcgagtattatatttacatcagatactactcatcctatatgtttgttctgcaggaaccagatccagatatgcataaaaggtattaatggctttaagcttatctcctacgctccaggaatggatcagccagaacataaccaccggcttgcgtcgaagccgccgactggtgtttccgcctgcacggctggcctattatgccggcggtgttgggcgtctacgtcttcaccgtcggcttgcctttgccgccgccgactggtgtctccgcctgcacggctggcctattatgccgccgttgttgggtgtctacgtcttcaccgaccggcttgcctttgccgccgccgactggtatctccgcctcacgactggcctattatgccgtcgtttattgggcgtctacgtcttcaccgaccgacttgccttcaccgccgccgactagtgtctctgcctgcacagctggcctattatgtcgccgttgttgggcgtctccgtcttcatcgccggctcaccttcgctgccgccgactggtgtctccgcctgcacggctggtttattatgccgccgttgtaggacgtctacatcttctccgaccggccatctcgtatgacgccaactggtgctatcgtcttcacggctggccacgtcaccgccaccgcaaataggcgtcatcaccttcaacgcaagctgtctacgtctgctgccgactggtttcttcacttccgtggctgcatgattctgccagtgttgattggccttatcgtcttcaacgccggtcatcttgcctgacgccgactggcttattcgcctccacggctgcgcatcttcgtcatcattgactgacgtcgttgtcatcgccagtttgccttcgccgccgcccatggtgtcttcactttcatggctggcctattttgccactattaaaggacgtcttcgttttcgtcatcattctacttcttctgtcgctgactggttatgccgccgccgactgagcaacttcatcttcattttcttctgcaccggcaaacccaattaccgctacttcgcaagttttgctacttcaccaatcacgacgtctacaagagcttcgacatctcgacatgtacttccatattcgatgcagtgttattctactacaacaagtggttccctaattttcaagatttctattcgaacatcttcaacacgtatcttcactcaagcaatggctactcggcgataagctacagttctcgactctatgttcagttgtttcccaactaaccaaagagtcaggggctacacaaatacaagacttaaaatttgacagatgttatgtcaacatgaagcaatcaattaatcagctaacgagttctatggaatctacttcgggagtcatcagcttcgtcctcgctccaaagcaggcgttctacttcagcaatctcaattattttaccggcaattttggcttcttagcgctgccataatctactccaaaaatctcaagtatcaagttcaagatttaatctacatgttcgggagcttagagttatcaactaatcaactcatatcagattcaatgagttgaacaatagcatatactttcctctaagtgaagcatctgcaacagctatagcaccaagttctactgccatcttcataaatcaagaggcgttgcatcaatcttcatcacacacatgccaacattaagaaaatactcgagcttcgatatcttctcaacagtttgatgggttattgtcactgacctcattaccaacgcctctacttcatcggccttgacgtctacgccgttgctaaggggtgactatgtcttcaccttcagttgcttctgtcatcaccgactttcatcgccgacttgttattttgtcttcacggttggcttactacgcaaccgctgatgggagacctcatcgttatcattgactgctagactgctattgattggatcaacgatatcgtcatcttcatcaacatcctatcaagcctcttcaacatagcctactctactgctaatcatgtctgttgctgcttatcgtcattactttcggttgtgtttgccgtcgccgactattttcttcatcttcatgattgatggatttcgccattgtcattgatgagcatctacgtcttcaccaccggctttcctccgccgccgcccatggtgtcttcgctttcacggctggcttattatgcctttactgatgggcgtcttcgtcttcttcaccggctgtctcatctgttattgactgattatttcactgccatggttgcacaattcagtcgctgttactaggcgcattcgtcttcactgctagctgacttgtctgccgctgattggtttcttcacctccatggctatgcgacttcattacctttgattggtgtcattgtctttttcaccaccaacatcttcgtcagccttgatgggtgatatcatcttcatgttggtcatttcatctccatgtcgactgcatcagctattgccaatggacaattttgactatgacagaaggacaagctatatatgctcagggacttatcaactcaaacacaaggatcatacatgcaagttggattttgttctagatacaggtaacatgcacttgtagtcctgagattattttctatactcgaagactggactaatcattattctccgtaagggctatcaaccgaatacttgcgccagtcgggattcaatttttatatctattttggagtatcccataagggataatcactcagatcagaagctattcatatgagctacacttggtctatatcacccggaagatttattactcgggagcatattacatgcgtcatactttaaagggtgtcgaaggcatattttttggcctaggcctaatatgtctgcaacccatatttttaggtgtggcctgtcacgttcttttagggacttaggcactttttgcttaggccaaagtgcgcgtgatcaagtgcctaataccttaaaatccttttataccgtagttactcaactttttagaagttggtacaatgcatcttaaaaggtgtcaaaaagtaaagctttatatagctgccccgctgatttttttatatagtcatggcgctgtttgggtttatcaagcaattgattggatacaatatcattgctttttgccacgtaagtgtgcatttttattgaccaatattatggcttaggctgattatatattgtggtcatttttcagacggttggtaaatccttatgagtttatttactcagattttacaccacataggccatatatttccaggtgtggtgaaaccatgtgtcttttagggatttaagcacatatgttaaagcagtgtgcgcatggtgtgtgcccaataccttggaaatttctttattcacaacatacaagcttctttatagctgttttgctatgtgaattttcaatgatgtagtcaactttaggttggatgcatcatgctttacaaagcagtcagtatatcacttagatcatgttattcgggatttcacaccgcatatgctatatattgatatcaagtcacttggttgactataattatcaaaaatcactcagttagttggattatttattccttgactatatgcttggtttgttcaactaaccacatagtcgggggctacacctattagatgcatctactcgatgcacctgaccttatttttcagccctccacagtcttctgatttggtaaaaatactcgggtgtaacaacccagcccagggcttaataggattaatagaatactcatatcaacaagttgcaacttattttccggaagccgatcaataaataactctaaggttaagcgtgcttagcttggagcaatttagtgatgggtgaccgatcgggaagttcttcctgagttcacactagtaaggacaaagtgtgcagaaaagatatgtgttggtctgtgagggctgtctatgacctataaaagctaccatatgtaagcgggcccggcctgggagagatgagggctgtctatgacctataaaagataccatatgtaagcgggcccggcctaggagagacggaacgttacaaagtggtatcagagctgtcgagcatggtgcgcatggctggtgttgatccggagtggtctggtatcagagccgactctcgtggtttcacgggctcgtgtgtcgcagttgcgcaggcatggtgcgcatggctggtgttgatccagagtggtcacacagcatgccacatgcgctggcactggacatacggacgtggccaagaggggacgttcctggcctgggggggttgatcgacgggggcgtcgatctctcttaagggggtgaggacatacggacgtggccaagaggggacgttcctgtcctaggggggttgatcgacgggggcgtcgatctctcttaagggggtggcctagggcttaataggattaatacaatactcatatcaacaagttgcaacttcttttccgaaagccgatcactaaagaactctgaggataagcgtgcttggcctggagcaatttagggatgggtgaccgatcgggaacaaagggagaccatggcaaagatgattgaagcactcggctttagagtaatctatatgtaagcgggcccggcctgggagagacgggacgttacaaagggagaccatggcaaagatgattgaagcactcagctttggagtaatctgatttgagagaagattatcttttcgactgtgaaggtctcaggagctactgtggagattatgggtaccccatacccacacggcatggttatccgactggttataggggataacttatatctatgaaatatgtaacagatcatgacttgggtattacgtttccttgcatattatggaacgacctaaagtcctggtttgataagattgtaaagtagatttagaaaaccgataccatattggttaaggtttctatcttgtaatcttgccccccatcctatataaggtggacaggaggccctctaggggttaagagacacaacctgatcgtcagatcaataacacaccctgcggattcaaatccccaaacaggagtcattgagagggcttgaacctgtctaaattcttgtctccgcatccatccacttttaggtcttgtgcgctacccccttttattattgccgaattcatgtttcgacactcaaacccgatgaagttgctccagtcagaccacctatttaatgtcagtcagatcgcagcttaaccaccggtctaaccacctgtctgcctttggtcagaccacctccctgtcgtcagtccaatctacttcgttgctacctgttgcaccgctcgtcggtctgaccgcaccaccagcatcagtttgaccaccgagatgcagaaaaacacaaattagagaactctctaaaagcatatcaactttattgcttctaattatatttacaaagtgcaatctctcaactttcaaactaaactcaaaatctaggctaaacccttaattttctcaatactactctctcacaaaaaatggatacggagaggtctcaacccctcttctatttataccctgagatggctatgcaaaaccacaaatctaacatggttaagtactcctaatctcttaggaaactcacccttacatgtattaaacttatcctttacaaatttaaacgcaaaacatttcaaacttggactccacatcccatgcatacacatataatccatcttgtatgccataggaatcttcaccactacgtacattgttctctagctttaatatcccacatgatctcctgattgtccaaacatcaacttctcctaagttaactcccgatccattaccggcaatactctcctaagcctcaagatacatctacacatgaataaacaaaaaaccatatgtaagcacaagctatatcctatcttggctcatcattagcatacaatagtataacatagtatagaaatcatatagaaataataaatatgaagtaaacatggtaattcaagaaatcaactcgaaacagactccaatcaagagtatgtcggtcagaccatcggactggtcgttctgaccgtcctcatgcagagagaataaaaccacttcgccaatagatcaccaaacatcaaaaccaatttaagtcaatatgttaattgttcataaaaagtataaatcaaaacattgatttcacatttttaacgtttgtgcaaaatgcggcaagttaaaagctactactccagatccatgcaaaaaaaaaatctactccagaaaaaaggaaaagaaaattaactatataattctcccagaaaataattaagtgcatcttgtgctaagttagtggaccctcggaatatccatagcttgcaaaattcctatttgtttccaagaagaattctaaattaattaattaactatccatgcagtcaaaaccgattagttgtttcttcggtgaataatgctaaacaaatcactaccttaagcgcagccaaaggagacaaacaaaagaagcgtcgccatcgcagcgaattgaaggtgtatacatcaaccaaatctcagtggagtgtggggccatccaggatgcagctagctacctgaccatccagagccggaccagccgcctccttaattccacgctcaaatgatcaccctaattaacacacatttataaagtccaaacacgccaaccaaaagtgtgaggcgtacgctaaaagacagcctatatatgcagcctctacatactacttggcttggtcaggttgatatatggtccatgcatgtgtaattaactatagtacttagtagagattaggagcattgtttcttccatggcgtgctatagctcatgacctgaagaggtcaagcctgacgttgacagcgtttcagtaggtcgcggactcttgctgcatgcagctactataataaacagttcgtcccagtattccaccatgcatgtgattgcctacaaatcttgtctccagtgaaggacccctccaagaaagatgttcaattttcaagccttctcgctggtcattctgctccatacaaaatgatccgatccgatcgcctggatggtatcactgctgtgcgtcctattccagcagtgacttttactgtcaatatgcgtgtcctaaacagtctgaattccgagtagaacacgcatgttaggacaacgctacatgcacatcgatggtgacgattgtactgactagtgagttttacaggttttttcatcaggttggaagggccgttcattatttcatcctcctcctatgtttcaagctaggtttgacttcgagcagattattgagacgacatgatggctgtgtttgtttggacgttttcccatcgcgctacagtgttttgcccccgcgcacgcttttcaaactactacacggtgtacttttttgcaaaaagtttctatacaaaagttgcttaaaaaaatcaaattaatccatttttgaaaaaaaaaattagctaatacttaattaatcacgtgttaatgaaccgttccgttttccgtattactgtagcgcgctgggaaaacatccaaacgaacacagccgataactttgtagtcgctgggggctacccgagtcatgtgatggtcgtctatcctctgatgatagagtttctaacctaaagggtaaggtgctaaccgacaagcaaatgcgtgatgcgatggtcttggagatatctggttaattgcgcccagatcattgattaatccgatcaatgcaaagcaattgggctctttaattcctccatttcttgtagtcttagaggctcatccagtcgtttctagtagtaaaatccaacgaattgtcatgtccactatataatttgtactgcaactgtgtagtagtaggcgctagcagtgcttataactgtataaacagccaaaaagaggccataacggcgcaacgagcactagcaaatctcagggcaccacaatggttatctataaactctctataagagatttatgtcagcatatttttctacttagaagatattaaagagagagagagagcaaatctatctactaacttagagatagtctataaagaaaaacaactcaatacatgagagagctatagatacccatatagacatactattgaggtggtttactattaatctagtctattgctgagaggtacatgttttatagagagcactttactttaccattgcgggtgctttcatgaacacatatacagcaattacgaccttatcttctgtcacagaaattaaccatacaccttacgcgaatgtgcctactctgttgactggtttggcaacacagtggaacctgtaatcctgtacacaaagtcacacattagggggctagctaggcagtttgaacagaggacctagctgcatcaagaaaaggttgagaactagctggtttggacgttaggttcaaatgattaactccgcaaaaacggacacattccaaaagaactgattaacctctccgacgactttcaggcctgatccatcccccactaaccacaagagatcggtgcttttgcacttacactctggagatgttcagatgatcccgtagggaagctctaatcctatattcctcttattcacagttttggtgcatttcgataatgaaatgggagaggaaccctctctttctccaaaaaaaatcacagttctggtgattacgaacctcaccgtcacaagataataactgggcctggagttttggacgaagattgcagccgggagaggaacaagttcatatgaggccccttaacttgtcagcgaatccaatttttattcttcaaccgaaaaacaaaatacaatgggtccctcaactgttaaaaccggtgcaaacaagtcctaaggcggtttggatggcgatttcagttgacgtgacacttacgtggctaatttgactcgattttcatctgacgtggcattgacgtgacacatgaagcaaaacttaacaatttaaaaaataaaacaaaatatgtgggcccacatgtcagttaaataataatattaaaaaatagtaggccccacctcatcccctcagttctctatctcctctcccttttctcccctcctcctatcgtggagtacacgagctgacacgaccaccatcccggggctttgccgctggtgtcggtgccgagggagaaatcgacgaggttggcagcggaagaggatggcagcgtggccggtggtggaggaggacggtggagaaggacggcgccgtggccgccggtagcggaggaggacggcaccatggctcgcggcgacggaggagggaggaggacggcgtcgtggtccacggcctcctgcggcggcgggggaggacggcggcggaggaggacaacaccctgccccgcgacagcggagggggactatgccgtggccctcagactcccgcggcggtgggggactgtggatgcaaaaaacacacactggcatgggagatctgcttaactcctgcgcaggtccaaaatctcgcctttaggttcgtaagcatgccagttgatttgatcctgcaatcaacaagaataaagacaagaaaaagcgcggttaaatccataaacgatagccgatcggctaattgtcaatgaccatatcatttatctttgatgccgatgtcacgtcagaatcgatcggcaatgattaataaataaaataaaactaaatatactcgagcggctgtagatattaacaacatacaatctttactttaatgtatacttaaactaagtgattgggatatatcggtcgccatgccgagacagtataaatcacttaagtcgaaatatatattaaagcaaagattatatagatgtttatagcatagccgatcagatagatctagcatgtatcggctaatactccgataccactttatatcaagatatcgaaacaagcaagatatatcaaataagaaacctaatataactttaaagcaacaagatcttaatataaatggcagattcaattaagcatatgatgttagaatagctaaatcaggtaagatcggctgaaactccgatactatctctattgataatcataacacaagctagatatcacaattatatataaaacttaatagatcgaactcaaccgatgcagcattaagcatgaagataactataagatctaaacaagatgatgaaaccctctgaaagatggtagatatacgatataatctagatcaataacgagagatttaactctatcggctactttctaacagtaaaaactagtcgatggcaagttatatagcgaaactaacaaagattataaagtatatatgataactcgatgaattacattaacaagattagagtgtcataaagatggaagcactaatcccgaaaacgcaaaccgccatgacaagtttacctctagttgaagatcgaatcgatgcagctcaacccgaaagcaagaactcgtcgaaatagaacgaaagtaaaaaggtggcgatgcgctgaaagtgttattgaacatgtgttaattaattacatgggttcaggtcatatttatacccgagatacaaaatatgtccttgccggacacgactcttatctctaacaaactctaagataccataagtctttgcggcagacttttgtccaaacatatctttaaggaaattacataaaatatcctaattaatagatacaattgcctatctgagagctttatccctatcgtggcaatccttgtgaagcacgtcgatcgattctagaaacaatctcgaagccatcttcatcaaaatcggctgtatcatccatcctttgaccgattcaatccagccgatgcctctgcagccgatgcatactctgttcttcgaacctatctccttgctgaatccgcttcgattccaatgtcgaacttggttcataccttaccaaatttggtcattaacagggacgacggcggagatggacggcgctgtggtccgcggcctgccgcggcgacggggaggacggcgtcatggcccacgatggcaaaggaggacggcgtcgtggcccgcggcgacggggaaggacggcgtcgtggcccactgacatgtgggtctcagtatttttttaattctattatttgactgacatgagagtccacatatttgtttttatttctaaattgttaaattttgattcatttgtcacgtcagataaagaccgagtcaaattagccacgtagtcgccacgtcagttgaaaccgccgtcgaaactgctttgggactcattttgcaccggttttaatagttgagggacccgttatatctggttttccggttgaaggacgaaaatcagattcgttgacaagttaagggacaacagatgaacttatttgcaccgtgagaagcagcaggacctgacttacctctacccaaaacttggaatcttccatcgtcatacatgcggacttgtacagcccaaaacttggaatcttctgggccgaagcctcgccgtgggacggccgtgaccgcggatgccactactatgcttggaaagcggtgggctggtggctaccaatagtccaatacggcaacatatcgaggccttgcgggctaacacatccatcacccattccagcccaaaaccttccggcctgatagtctattggcaatccctctatacccggcttggagccgttttgacgctgtgagcggcggcgcagatacgtgcggcatggaaatcagatcgttgttgaattttgcggctaataaagccgttgtgtcttgtgtgtgctctgactaaacagtttggtctcgtctctcgcccgtctccctcgtggcaccatatgcccctcttctcctttactctgtcggtcccctccctctgtactgtgactgtcactttgatgatctgttcctctgtagaccttctcctgtgtacaccagtactcagccgaccctccccgaagatccccttgcttactacatagttcagttcattggctacttgatatgccgttcaaatggtacttcatttcaactttcaagtgatagcatgtggttaagtttttttttttcatttttcttagaaactttgagccttcaatcggctattgctcatgctattgccttaaatttgattgtacagaaggaacaagaaagtagaaacacataaatggaaaaaatagtgaagttgatcgttagatactctgaattaaaacagctgatgtttgcccaaaagttctgttcagaaaactcagaacaaaatgcgaatacggaatatgctactatgctgaaaactcagaagtcaggattttttttttgtttagtacagttcgtatatctctcttcttcatgaaaacaacaaagattctgagcttattttgcagatgcattacttccatactccctccgttcctgaatagtcagcactgttgatcattattgtttcaactttgatcgctcttctttcttttgtagatgcgaatagttcctggatggggcagtaccaaataatgcttcatatggctatatggatgtgcatcaaataattgagagcagctcaacagtggtagctatgctgaacgaaataattcaaattactctgggaacacatatggatatacaacaggacgttggattggagagtgcacaacgtgcatcgccatgaagcttggtcgacgttcttcaagtggaatgttgtattggtatgaagctgagagcctgagatgcacgcctatgaaccaacggagggccttcttccgatttcgtaaaggggtttcacttttctttcactttcacctacacagatgagaagcatttctatcggcttcccaagttcccatcttcattgttggacaaggttattaattgattcagaaggttattgagaatatgaaagccactgtttgcgcagttaatagaccatgtggttcggtgggttggagatattttcagactagattgatcccctgaatcttcagagatgtgacatgggaacaaaaggtgactactatgcaatatctgagtgtcttgtggcgattgatctgtcagtaatcagtaataacctttctgcaacaatcttcgtccatttctgtcattctcatactgttgtttgattttatcaatactagattatttaacgtgttggcctgcgcagtacttgagaggtccaaactaagtggtttttgttataagcgcccacaactatacgcacgttgacgaagcggttagatctccaaccaccatcacatgatcatttcgagagagaaaagaatcgctactctgaactgctgctaatataatgtcttatcatcttccctgcaacattatcaaaccagtgaggacttcacttcagtgttgcaaaacagggtacgctgcctcagaaaacatcagcaacaaattggaaaacatcttggaagagtgcctttgtctagtctgaatattctgaccaaactgatcctggcagaattgtttgctgtgtaaatatcaggcataagttgctggatatgcactcgccaattcaccaactcatcttggaggattgcaattatggactcagaagatgccctttatgcagaacatgatcccattgtttacagcaacttggactctatattgtgttgttcactgttcagtacgtactccatcttcgtgcaactacttgattcaatcagatttttttttaatggaaaatttgcacatctcaatttcatctgtctgtgttatatatattctatgatcgttaataattaatgtgattttacatgataacaatcttatttgtcactctttttcgcgctagagtagcaaagcagcattttgaccagagacaagcagagttttatgaaaaaatatctgcacagtccgataaatatcattcgtaaggagagctaccgcagaagatataaaggcacagtttggataatgaaagcgctagcaccaacccatcacgtgacgtgagcatagctgtacaaacctacaaaacatcaattctactactgagtactcctactgagtactccctcctagattgctatattttgagacggagggagtgcttcatagatacagtaaaaagaaaaaggcagagcaactgcctgaagaaagtatctacatagatcgaaggggatttatccttctatccttgttctaaccatcatctgttcatagttgttcataccccttgaagcaacctataaatcacagaaaaccaaacaagacagatgtgtcaatgcaaatatcatgggtacaagaattttacagtactagaaaattagttagtaactttattttttcacggtagatttgttactccctccgtttcatattataaattattttgactagtagaaaaacaaacacattttcaaaatatgttttatgttagatttaatgaaactaatttggtgtttctaatattactaagttctccataaacttggttgaatttaataaaatttaacttgaaaaaagtcaaaatactatataattggaagtggatttttgtccctcaaggagacatctcctcgttttgtgtatgtcgtttaaaaagttataaaaaattttaaaaaaatttgtcaaggtagatcaatatatgatatatatcttttcgtaaacaagcgagttaaaattcgactaatacaattcgaaacaaaaataataaatttgaccatggattacacattctattcatagtcaaatttattgtttttgtttctacttgtgtaagttgaatttgaatttacatgtttgtaaagtgacatatcatctatcctactaaattttttcaaatgttttaatgactttttaagtgacatgtaaaaatgagggatattctattaagggatgaattgagttttcctagataattaaaattaaggtgttagctggaatcatgcatgtatattagtactaacaacttatgcaaagcaatagattgccacgatcgcattgtcacattattatctctttggtacatgatagatgattactccctccatttcaaaatgtttgacacagttaaatttttagtacgtgcttgaccattcgtcttattcaaaaaatttaaataattattcattcttttcatatcatttgattcattgttaaatatactttcatgtacacatatagttttatatttttcaagagtttttaataagacaaacggtcaaacatatgctaaaaagttaacggtgtcaaatattttaaaacggaggaagtagatgatagttaggtgagagagagggagaaggatcgtgtgggatggcgttctgctctacacaaacctgatcgatggatccctctagcggccgggcgcgtcatccggtgccgcggccgcgggcggcaggacgggaggaaggcgcggcgcggttggactcgacggcgctgtcggggaggggccggtcgagcgagagcgagagctggtgctggccgcagcgacctgcggctgcgggcgccggcggaggcgcgggccggcggcagagcctccgcgacgcccgccgctcgtcgctgacggcgacggcggcgagctcctgctgcacgaaggagagctccatgcggtcgaggaacgccgcgtgctgctcctccgtccacgctccctcgccgcgcgccagcgccgccgccagatcgtccatccggtccacgcgccgagccgaaggcgaggcgcgcgcgcgcgcgggcggacgaaatatctcgcggagtcgcacggacgaaacgaacaccgggcctgcacttggtcgcatcatattatacaaatcggcatggcgttgttgttgcacggggcttggcttggtttggttaaggcgttaagccacggtgaatacgacgcatgcactggcgcagtggcgctagctccatgcagcttcgcggtgaggcgacccgatggacggatcagcgggagatatttttccaggttaggtcagagtcagctcctctctctagggagcaaaagtgcgttgacgctttgctcacttcaccgcatgtatctatctggccctgacacacaaaaggtagcgcgccgtgcagcccatgctgtgctgctgggccaggtcgtatatgatattcggccagttatttcttttctcttgcccaactgtcacgcgcccacgcgcgtaagtattcaacaggacatctatcaattccatggagtatcctcacgtgccgtgtagtgtagttggcggccagcccattgaggaaacctgaaaccgcaagagcaaaaatatctagggcagtcttcaagcgttactataaagattgtttcgatggttggtggcgaaaacaaagagtattagattgtgattgattaaaggcttatttagttgaaggacttgactacacagcaagtggtagttggtttgtctataagaggcactatctacctatactttaaatacaattttctcttaaactactcatccgattacactgttgtgttcgtaacaattaaatctttataacaagatctcacatgattatattttaatgaaaaataataaattacttttataatatatctaaattacttttagatttcactaaattacttcttagacatataaaagtaattcaataaagtctaaaagtaatttacatatattataaaagtaacttataacaaaaagaaagtaactctaattaatacattttttttcattagacgtgactacacagctagtgttaactagtttgtacttcatctagcatctcctttcaacttgaacaatgcaaaagttacttccaattaacattgaagttacttttaaaaattgttaaacttacgtgtgttgatctgtgctgattaaatttaatttctagacaaagtcatatttttatccctgcaacgaatttacttctaatgtcgtgataaagttacttacgttttgttttaagttacttttataatatatgtaaattactttcttattgaatttacttttatatgtctaagaagtaatttagtgaaatctaaaagtaacttatatatatgataaaagtaacttacatatataataaaagtaatttacaaatataaatattttttcatcgtaatataatcatgtaagatcttgttgtgaaatttatttgtaacgaacacaatggtgtaatcggattatagataggataaaaaatttgagagaaaactttgtttgaagagaaaaatgacatgggagagaaaattgtagcctttctctctgtgactctctttgaagcaggaattgcgtgtgcgtgtggttggagatcggacggctctaccagcgtcgcgcgatagcgctaaaacgagagggctctcgaattagattttacgttagttgaatgttacattttgtgtacattttatcacaccaaatgctaagcacgccatgctttttaggtaagtgtttgtcacactgctacagccgtatcttgccacattttagtcttattataacttcaccaaaactttgctatacaagtgtgactaacaatttgataaacacgcattagataaggtttgacaaagaaatgagtctacgataagtgaagccaaaatgtggcaagtcacttacggtagtgaaagaaagattggtcgtttagttggtaaagcgtggcattcaaccatacatgccaatggattaattagatacattccattaaaaatttatcggtttcgaaatatatcattattatttacgtatttgtaatgatgtcactggtacttgtttgtaatctcagtggtgccactaagattcatattttgcatgtattggacgaaaatgccctcatcttctaactctctctctcttccctcatcctttctcctctctctgacccgaatctcatcgaagccggcggtcctcgttgcttcggcatcgtcgttgcccaggactcgtcgggcgagcgcggcgatcaccgtctccatcaccgacagctgccgccgtggctagccccgcggccgccgccagcagcatccctgacgctgccctctattgcgggaggtacatcgccagccgtggcggcatcgcctaggcagcagcaccagggtgaatgaccggcgggcggtggagcgcgtgcagcaggccggcggcgccgatgctgacgcctgctccccccgcgggcatctgcgtgaggttgagggtaatggtggggaatggcacagagacggagagcgtcaccatggtgaacggcatggaggtggagagcatcgccatggtgaggaacgggaggtcgcctccccaacaagcgctgacggcggggttacgcgccagccagtccctgaggaggccattggcggcagcgaggagggaggagggcgcagagagttgcgtgcccatccatagctcggtgtaagggcgggccaggttggggtcgttggcgtcggcttggtgcatgtctcaaatatgtgtaaaattgtaatggcacggttccaaatacttgaatactagtggcatatttcaaaactagcatattttcaatggtatggatctaattaaccctttaatctatgtgccttgtgcccaaataaaaacaatgtgctttgccttgatcttagatacataaatagaaaaaaaggataactttcttgagaaaacccctaatgccagtcatttctttccattcaccggattgagatcaaaggtctacataggattagacgaaaaactctcattagctcagcttggctcgttttgttttgtaacgagcggaactcatgttttagttcgtttcaggtaacgagtcaacttgagctactcacgagctagaacgagccaaggctagcaaaggcaacccaactcgcgagcggctaggcctagcacaacccaataaagcagaaccaataaggcgtggcacaactccctattatggcaatccctaataggctcccagccaccacccgctctcagtgtctcgttgtgtgactccatttagtacatataccaaaccctaccatctcctacttctagcagccgccaccgtcccacactttttgcttcaagcgcatcgccttcaagaaccaccgttcaccatggttgaaacccgaacttcggtgtggtacttgcccccaccctcctccgtcgtctccgatagctctcgaggctcagtagccaccaactgaacaaccaagattcccacttcccacccacctcttccgtctcccaccgtcaaattcaccacttgctcaccatcggtcaccgccacttaaccacttggccaagattcccccgtagatgccaccaccactcgcggccctactccatcactgcagatcctatggcaccatcaccaccacacactatgagttcactgtctcctcgatctctttctatgccaaggaactcacccatctttcccgtcacctaccctccctcctaccttaggatcgccaccacttcgccagagttcactaaggttgttgaggtggagaaagaagctcactaaatttagtgaaattaatttggtattatagatgttgctaatatttttctataaacttgatcaaacctgaagaattttaattaagaaaaagtcaaatgacacagaacaaacataggaattgaagacacgacaaatccataaggtgagaccttgtgttaatttttactcaaaatccttatgaaatggtccattctgtaatattttcaaaggaattttgagggttcgatcaaaatccttcacttttcctttgttccaaaggagccctaatattctgttgcagagcaaagtggttctctaaattaataccaggacatcgttcaccaatctacagctcatttaaatatgtttgtagatttgagaaatttacttaagtagagaatgatttatattttgtgatggaagaataattaaggtggatggacatatatttcaaatacaaactgtcaaagactattgataacctatataacaaaaaaccgtgcgatgatgcacacacatcaaacttgtcatcattgccaatatttatactaagccatagcataatatgaagatttactgacaatcaacggaaacgactggatccaaaaaaaaaatggcgtgctacttctttgagttcaaagaggcaaaagactcaaactagtactccgtatatacacaagcaagcaggtgaacgacacacaatgctcagttgcacgtatatacacaagcaagcaggtgaaccacacacaatcctcaccttccacgactcacacaacctacaagacagcaggcagcagcgcaaaggcatgtgaaacaaggagacatggggcatggtgaccactatgagcatatatattgaatacaagaatttacatggatcatttgtttttcttttgttatattagcaaacacataagaacgcacactctaggggatttgacatgaaaagtaccacagttgtgacagaagtcgcgtgggacgagaagctaaataccgattatgcttggattctctcgtggagatttatacttcttcactaccactgctgctactgttttttcgaacattgaacttgcataggggacaagtcgcattgatgtgcagccatttatcaatgcagacacagtggaaatggtgcccacaagggagctcacgcagctctgcaccatcatcatacgctgacaggcaaatgcagcactcctgcaccgatcaattggatggtgaagtcatttatcataaaatataagggatggctgggtgcaacaggactaagagacttagattataaccataacgggtgaacaagaaaaatgttccatgatgcaacaatccaagaaatcacttagagaaacaatatcagtatgaagaaactttgaggccaaaaaaatgaggtagttaaaccacctcttttatttgctaaataaccaatacaaaggctacagatgtatttggtctgaaggtccaaatgtacagagttgggcaattgtaagctcaaactcatgagtttattctttccaacttaagctctaaatttcccttaataagaaacaactaagtgagtttacaattaaaaagtggctcatgactctacagcatagggtttgcattgcctcctgaatactggcaattcctcatattctagtacggaaatttcaaatattgcatttaccccagtaatgggactggatacgagccactttttttcaccgggaaattatgagccactttttcccttctcaggtcaattttgtgttacaaatgagttcaatcacctacttcttccccagtataactagtagtggttttggaactttgctagtgggaaactttgatggtttgctaagcatgctgcaactagtatgacaaactgtgatgtgccaactgtgccaaacagtcaaacacagttagatgcctaattttgtagaaattgatcaaatcaggatgaatcagacttgattaaacagtcaataaagtacactcagaaattgttgatataagaaaaagaaaagtgaacaacttaccgcatcttcagctgcaagtactttttcaataggttggttggtgccacattctatcattattccaccggaagatccagtcatgttgacagattgcttttcaggctcatccatcctccgaaatttgtatcttggaatttggcgaatatcatcttccgatgctccctcctggtatcaaccagatggtaaaaacattatcatgtgtatactcatctccaaagcgatgtaatccatgagatatgcgatgttcaagcagattattcatatatactgcacacataaattattctaaggaaaggaagctgggaagtcttactaccagcatacaattaaacaatattaatataaacccagaatgatgagtatcgggatgtgtccataagtccaactagggtcagctgggacagtttgaagtttgaacagcaaaagaaattgatgaatttaaatttaaaattttgcaaaatgattagagaacacaagagaaatattccaatactgaactttctcagtttcctagcgatatccgacttttaacagcttaacgtcaactgaaacagttttaacagtagctagccaatatcaccccatttatttagaaaaaccgtgtggtctttcaatttcatcaggggatggacctggatcggggtcctcttgaacgaggccataaaaataattgcattccatggacatatgttcctactaatatggccaaggcctaaccagttgattttgagaatagttacagccctatacggtgaccaatttgaagcaagaagagaatcaacggcacaagaagggtagacttagcataattacgaaaataagttactagctgtaacattaatgacattctctactgtaggcataaggcattcaataaaccatacctgatcagacacagcatataaaattgctatgatacatgggaggcagcaacaaacagcaattccaatgatgcaagccaaagcaacacaaaagacgacaaagaaaacatcaaatgccagaaagacgatgcaaagcctgcagatgaagtgtaaacagatataatgaaaaacaaataaaatgatgagacatgtcaaaaacttcaggcatatcttagaaattatattaccagtaaagttgaggtgcatcatgagtaagaacttgcccaccagcagatacccagtaaaatccgattatccaccatataaaggagaacattgtattagcagactccagatgttttgcaatactgcaagcagatttatgaacagaaaaattatcaggatagaagatatggtggccaactgaactaaaagcaaaccatgaaaaataaattaaatggaaactatttccattaaatacactaaactaattataatagctctgatttcccatagaaataaaaatttctaaaataaaactaggaaggtgtggtaaataaaaatgagataaaggcttatagaaggtagaaaagcacagtcgcatttcagcatagaaatatgagaaagttatgctatattcagagatacacagcagagtgaccacattagtgtgcctctcctctctaactgacaatcaaaacctccagcatccagcatagcatagatgcatgctatattatgtctgttaaagccacaacatgcttgaagtccatcttaagaattgacattctgcagacaactcatattggcactaacatagaaaaaccagtatgattcatgtaacttgcattactagaagcaactaggtggatgacgaactaagataaagtggacaacaataacttctggcaaaataggaacaaatgcaacaaaatatatcttagtggattcacagacaaaggtacttgttcaagatcaccaagacttaactgaaaacccaaggaacaaacaaagttagttttaaatattcatataattaaaatcaaatttggtagtcattcttgtttattctataggactaaagctactgagagctttaaaaagtaagcgatcatgcagaaataataaggttgtcacgatatagcaacataagaaacacaggtgagaaaattatgcatgtccagtaaatatatgagcagatattttgttacaggctttcaggttatggaaatcaagctaaaaacatccacttagaacttcaactataggtccatttcatgtattcaactatctttgttcacatatcaagccaagagttaattcaaccttggttgggaactctcatatggttctccttgttccaattaggcaaaaattaagacccacaaggacacgaccaacatttctagcatacattatgaacatagttaaaggattagtcttgaaatttggtacaaaattactaggatacctgtagtgtgaccacaatttctagtttaccatgaaaggaacgatagccttgaacttaacagtgaaagactgaaagttacttcaactagaacaaagctaaagtttagaacaattaaaggatcggtaatagcaacaatccctctaatcagtcctttacattaccgaacataatcgccattgcggccacggggagcacgctcgccggcgtcctcgtcacttgacgacgacgatccatcggttcctgtctcctcgtcggcggccatgggggattcaccgctctggccgcggcgcatacggtactcgatggcgacgcaggccatgtggaggacgcactgaacggcgtacccaacgatccagaggcggagcggcatggacgggctctcttcgcggctcagcgcgagcacggcggcggcaacgaggatgaaggcgaggttccacaggaggtcgagcgccaccacggggcgggagtaggcccagtcggcctgccgctcctccagctgatccgccgccgcttcccgcaccagcagggacggctcgcgcatcgcccggcgaccgctccggcgcaggaaccgagccgctccccggagcgacggccgccgcagcgcgccaccgtggcgacggccgccaccgccgccgccgccaccgaggagcggtgccgagtccaggcgcgcgtcgccacgggggcttggggatcgtggcgtcgccatcgccggaaccctagccgcggaatggggaggaacgtgtgggctggggctctggtactacctttcctcctcctctagaaatgagagaggaaattttctttcccggaaggactgttctttacttgattgtcatctcgcggagaattacaattttgattctgatgaatgaacggtgatttttttgggtgaaaattgcacggtgacgtattggttgaaaatgttgtaatgggagattgaagtttgattggtttaacctactttttagcatatagaatacgagcaatttttttccttaccaacaggaaaaacaagcacaagctgtagctcgatggaaatggttggagattcacttcccaggctgctacagttattcgattttttttgggttgccttttgtggtgttgctataagtgttaagtttttttttcgcctgaactagtgggtagagataatatgtcatgtgcacctgtaattttagctttgtgtatcagctcgaaaggtaagagaagacagtgaaggcttatcggtggaagcaaagaggtttggagttgacagagggggatggctgcctcaggtatgggaggaggacattgagcacatgggcggcgatgaatccaatagcacaagctatagagataagaagcggaagaacatcaaagatgttacgggatataatagataaggtgtattatgacggtattattataaaaggaaacacatggtgggtgagagcgggtaagtggatcttgctagtgttaataaagcatatggacgagatggttgaatatagaatgagacgctagagagtgatggtaagtggtagggttaaatttcgaataaacattgtattagaatatgacatcatggttgtattattcggtgctcactttataacatataaacacaaggatcttttgttacacttttgtgcgtacatgtggtggcatgtgcacttccgaaatactgcatacgtaaattagggataaatttcgtagacttactacataccaatatattttgaaaatctaaggttccttgttgccacaagttgttggtgtttctggccttataaggaaattgcttgacaacaaacattagagcaaaaggattcggtcgctatatccgctctattttgtaagcctggaacattagagcaaaaggactcggtgcaagagaacctttagatttccctttgccctaacttgttaattagaggatatatcattctagtgttttcaatacacaaaggtctggaaaaaaaaaggctaagttgtaaggtatttgacgcaacggtaatactaaccccttcagtgatctagaaataatgaacaatacccaaatatttgatagagtgtatttccctccatgagcagtagctagctaagtgtaagctagcctaaaattcacgggctatactgtattgttctggccactctctccaagtttattttttctatttgctttgttctaaatgtttgcggagagttggacttggttcgtggtagcacaacaactctattaattgttttggtcatatctatcacacttttttttatgaacttaggctgtcttggcaaaaacaatcatagagttaagtgtagtttagaccattattatttcaatcatcatgtatagttgggccaattatgagtttgaggcccatttatagtatagttgttacatctagatgtgtgaatgtgcttttacgctttttaccagttgatatttgtatctttctcttgcacatggaaatatctatatgggtatatttctcaatttatgtcttctataggcaatttattcttagccattggattaagatctgacgagtggtatgtcacagacacacacacactcaaatatatatatatatatatatatatatatatatatatatttgagcctgatctgaaccctagcttgagtcctcctacccttgccgccgccgtcgccaccaccgtccatctcccttcacttagcatcctctccaccacaacgattatctccggtgcccttcaccgtcttcttcgcaatcttgatgggtcatcacctccggatccacatttgttgtcatcgtcatgatcgagcattgttcagaaattagtcaccatcgattgccacacctccacaaatacgtctccatacctttcaaaagagcaccaagcgatgtgagaaaaggattggttgaaagaaactaaccatatgtgttacaacccgtaactaaaatgtttatttgtgattttgttaaatatttggttatttttttgaactgaagatatccttttgtggctcctaatacaattggttgtttccttattcacgtaagcaggatctgttcatgtgagcatgtgacattgtgggagtggggccatctcttctgcctcgccaacatctgagagcttgacatttgttaacggaaaaggcaaatggtaagcaatattttttccaacttctactgcatatatgcaatgcctctctccatggaatttatgggccttttaaaccgaggaatttccttacaattgaactaaccatatctcgtagtagaagaggaatttcatccaacaagtatacattttgacctatgtttgatgaaattattgagtggaacgaattcagtgatctagagagtactgtaaacactggctacagtatcctcacgacatcattggccctgtttggggagcttgtcccagctgcagtttttctcaaaagctgcttctgctaaaagctgccccaaacagtccacagtttctgagaatctgtagctacagagctgaagaagccagaagctgggtttcaaagctttttcagattctcataaactggctatcaaacagctgcttctcaaaatcaaaaacttcttcaaacaggcctattttcacggctcacgacctaacaagccgacgccacggacgcggtcgttgacaagaggcttccagtgggcgcagcgcgcaccagccaccaccactccaccagggccaatctatgccgcctgcaggggggcgtgataacccaatcgttttgtcatctatagatgcggcgtgaaaagggtaaaaacagcgtgttttctttggggtagatcgatgaggtgacgagcgtaggcctttcaacttttcgactgtactccgtacagaactgggtagactcccatgacccatcgccatcgcagtcctgcaggcacgtacacacagctgcgctggtgaacatgaaatgctcagtactcactgttccggggtagacaggatcttatgtggtcgtagcactgtagagtactagtactggtactagtatttccttgcaccaggcgtcatgctgctcgagtatttgcaggccagcacgtacaactaactgtagtagtacatgcaaacaccaatccatagctttgatcccatgtgtattgcaaaaaacaattttcagctgatccatagcaatgccactgtcaaacagacattattggctgatacactttctgaaaccttcaatttgatcctacacttgtaccataacctatatgaagtatggacgacactagtacagtatgaacccagcatttccgagaaactactagtacaggctacctcatacagccatagcacaacaaaaaacaaacaacactagagcaacgatgagccaactgccaaaagtatacaggtttgactccctaagacgacgaaactaaagcataagtttaacccctcgaagaaatgtccaaaatgcatggtactgtatcatccaatgatcaccggctgccggggagagatcggcgtacggtagaggccagagtcaatacccgaaccaccaccattgctctgtgctaaggaccggccaagcaagatccttatcacctagcaaaggttattttcttttttcaacgcgcggttcgttcttgactcaggctcgtcgccgccggcgtatccccgcggacataaatccactgtaaacactcaggcgtcgcactgcagcgccgtcttgatcttcttgatggtgcaggagatgagattgttcacggtctcgaccgattccacggtgagcttggcggtgggctggttgttgacaagaatctggaacgccacggtgagcagagagccgcccgtctcgtacccggtggcgccgatgcgaggcccatcgggcaggatggcgaatccggatggaagcagagcaacataggtggagtcgccaccattcatgacaagctgcattgccgggatgtctaccggagcgtacacaacaatggagccagaagcgtcggtgcacgtctcctgaagtatcagcatgctgctctggttggcactcacagcctgcatcagaaaaggtaaaaaagaaaatatcttgttttattttctgcaaaatattatgaactacagaagcaacataattagagaaaaggattcatgggggtaaagaacgaaatttaatagtgacattgtacccgcgagactagttaacatctgaccagtcataaacagttcagacattagcctcattatccggagatgctagtgtttggaggatttgtttttcctatgtttttcttgtcaagcagtccctggaatcatgatctgcatacaggatccggatgcatgctaacgcatggtacacacacaacacagtagtgcaagttgtcaacctgacacctttttcaagcagatctgcgtttcctaccctgttctgtcctagtttgtcctcttctgcagacctcgtgtaaagttcggtgctagtcgttctagtcgggccttgattacgacccttttttctctaaccgaacaatatctgatggaaagttgccagactttttgtttgtgatcttctccatgtcatcgtcagtttacaatattggttatcgggtacggtgttcatagtttagacaggagtagcctttttttctggaaaggaaagacattagtagaggtctcacaaaacttgctaacctctcatttaggctacgggaacttataaacttttctttgttaggcacaatgtctctacctagctttcagcaatcttcttgtcaatgcactgatcagtatataagtgattaagtgcagtgctaagtagagtttgggttgaagataagaaaagggctactaataaatactacagaccaagaactttaaatcgtctactataggcctatagcaagttaacaaacgaataaggtggaataactttagaattaatagcccacccatcacctagaaatggaacgcacacctacattacattggcccatacttgtgattaatgcaatacatacagcataccagcttgtgtgcaggcttgtgtcggaagagaccaccgaaaatggttagccttatctactgtgctgttttgttcgaaattgatggcacgtactgctaaaaaattactctacgttttactatatacagtagtactatccagttaggcaccgcacaaaagaagaaatgtttagagcagatttggggtagcaaatactcacactggccctgaggagtgaaaccgagttcccatcccgctgccccttggcgatctgggtcatctcctgcatggggcctccattgctgaggatgtcccactccgcacgcagctgctcatcgcgcaggaagttgaagagcttctccggagccacgggcacccacaccgaggtggccgcgctcagcaccacgcccggtggctctccaggctcgctcacgctcttccgtgccatcacgcgcacgtcctccccgatgctaccggtcgcaccatccagcttgctccattcacgtgcagacgatgcgctcaccccagcacagaagttctccgtcatccggcgtgccagcttcagcatgcttcgcttgccctcttgcgatatagctgcatgcatcaaatgcaacacgtaattatcagtattccaagccaagatatctgtcctacaactgcactggccattctactcgaacaatggagatattctttcagtttgtcctgtttgaatgacgtcaaccgaaatgaattccatgcaaaatttgcgcacagttgattccgcaaattgagctcgttttagatggaaaatggcaagtagaggttcagaatttcctgtaccagtcgagtcatttgctgtcactgtagcagaggacatgaggatggcaaggcattcgcattggcgctgcagcgtcgcaagccaacgcctggcgccaaaggcgagaccagaccgaaggagtggacggtagagctggtgcactgatgcctcatcgtattccgtatgctcaacccatgtgacctacagggtaaatgcatccgttagcccataaatgcacgcccacatgcatgtgtctttaggtgcaatacatcagatgagagctctgcagtgcaatacaacaccctactgtggcttcacagtgcagagcacatttttgtttttaccctaagttttcttcccctctttgctgttggtcaagtaggggcagaaacgtaaaaaatgtgcaaggtttgcctgttaaccagcctcgagatgtgaacctatactgttgaccaccaacaagtaacttggcattagcgtataatttgtttagttactaatttatatctggcctaagggttgagacattttgatctgttgttattcataagcaaacagactaagaactggattcatccgaaataatgtatcaagaaagcaaggagtgcacagtacgggaaaagagtacacatgagggaactactgaagaaagattttcatatcttgagcaacataaaaaaataacacaaagaaacaacagcagatgtctgtgcacatggattagccaacaaatttcaatcatttcgatcaagagtgcaacattgttaattcattgccatgcgatatacccaaacttctgaatgatgcgtgcaactagttttttttatttttagggcgtgcatgccaactagtttaagagttatttctccatctgaactcttcaagaaagtgaatgaactcaccaacatgatgtgcatattataaaccagcatgtgattaagttgacaaaggaatagtagaaccaaatatgtttcctaaaagcccctagatcaggtggtatttctactgaaatccctaatcccatccaactgctctttacttcaaatctattaaaaacagattagatgccggatatgttgttggtttgttcaccttagaaattctaaacaaaatgtttccttcattagtgccacagattgagatcaaattaagaattgtgaaaacccaaggacatagagaccaatttttcaaccaaataggagcaagtggtccagatttcaacatgtaagggacatattgattaaattgcggacaagaagttacccaaggtgcaccatccaaggggtagaagcatctaatcccctaggaaagttggagctaagaataaacaagcaaaagaaaacatgtttggggaacagtgttggatccacaaaaacacttaattattctaaataaattgtatactccatctcctcgttgaccaaacgaattgtttattttgggtagtgggctcataaccctaattaacctattaggccttgacttgtgaacactatgctgcatgggcatcagcaaatcgcaccattaaactaatcacacactcttaaacaaacgtcatccccaagttctgagcagtgcatagtgatagtggtagtggagaagtagtggaattaacatagctctaaaacgccggggtaaactttgaccagttacttcgatgtaaaaaatccagcagtccctttcaaaataaaaaataaaaagcagtccctttcaaaataaaaaataaaaaaaatccagcaaacctgttcagaactacaagatgacaatactattaactgacttactgccacattaatcatagtgaaccattattgtgagagaacagagaaaccatttaaatggcttcttgttagttgttaccttgcaatacccattgggagtgtcttgcatcacacagccggaaggtaccctcctacacttcacatttccacctgtgggtgccgttccagaattatgatctctcactaaaccatcaatggacacatcaactactgcccatgcaccctcagccagctgcttacaaaaccggagaaatgtaacctccctaattggtactagaggtgagagcacctgtagctcagccttcatctgttgcaagcaaacacaagaaaaattaacaattcagaaagaaaatatgttagctacgtcttacactatgtaagataaatgaacattagcactgttgatcagcactcaccagcagcaacgcgccatttctgcttcctgcaatgccggtagacacctcctcaagcactgttgccttagcaatcatgcacgagaacatgtcagaccaccgtctctgtgaaatgaatgcaagtaacaccaacattagtacattataggattggaacggaacataagtatacggtgcgaaatgtggaggacattagcccaaacctcatccatgagggtctctacaagggcaaggctgttgtcgatgatgactagaccggattccctcgaggcctcagagacgtagccggcaggcttcatgccaatgcacggtaggaaggagtgaagatactcctcaaagttgagcacctccttgctgggagaaccaggcagtgccggaacccacaatggatcgtccatctgtgccatcttgacaagttcgtccatcgcgctgattgcaagctctaagaacacggacctgtcgatgttacccaccagcgatggtatagcagccccggttgcgcgcgcaggcgtgatcaccgtgcccatcgggctcgacacgcctccggcgaactcattcatacagccgggtagtgtaccgagagaccctaagccaccgatgcctccgatcgctagctccagcgacgagttaggcataggcagcgagaggtgcggctgcagcaagggcggcggcgacaggagggagatgggcttgcctaggaacttggtggcgagggcgcacacgcggttgagctcgtccttgaggcgcgcattctcgatgcgcaggtgctgctcctctagggacacctccccgagcatggcggggctcccgcagctgccgcacattgggctgcgcatcgcctcccggatcgtcatgttctcggcgcgcagcttgtcgttctcctgcttgagaagcgcgttctcgtgccgctccagttgcgtcttggtaaaacgaagatcgcggcgcgcgcggggggatcatgaaaccgtgtcaggaaattgcacgaaacgaaccggctcgaacgccgacgagagaagaagactaaggcacacgatgcgatgttctcgcggatgatttaccttcatctgcgtgcggcgattctggaaccagaacttgacctgccgcgcatcgagggagagcctcctgctgagctcggcgcgctgcttctcgtccggatgggggcactccttgaacagcctacacaagacggacgcatcgatccatgcatgagaggacaaagagaaaaaggttggcacagaggagaaggatgcaaagtacgagcgagcgttgagaggggaatttgctttacgcttcgagctcttggatctgctgcggcgtgtggcggtggtatcgcttcttcctcttgcgggagttgctgggctcggcgtcctcgacgtcgtcctcgccggcggccgagatggcgtcgagatggtcgcttcccgaccggctgtcgttctccgcctcagtgtccctcgtcatcgcgccgcccgcgctagaaccagcgccagcgccgccgccgagcatccgcccgccgatgccaccgccggcgttgtcctgtcaacaaaatagagaatcaatcaataacctctcgatcgaggagaaaactctcgtgtctacgaacagctgacgcaaccccggtccgcgacagccgccgaacgcataccagcgcgagggagagcgccggcgaggacgcgaagccactggcgaaagggaactgcatgcctcccccgccgccgccgtcaaagaggcccccaaagctcatgccgccgcctcctcgccgaagcaaaacaccacggcgtaaactcgagaaagtcctcttccttggatctaccccgcccctcccacacgcctcacaacccgattcctaacccacggcccaacgaagaagagtaagagactactggtagagagataaagcctcgccgaggcgagcgaaccctcaaaaccctaaccctccacggcggacggaggggcgggagagagggagggatagattaacaaggcgagcgagcgagcgagcgagcgaacgaactggtggcgaggggaggggacgcatccgattaaagaaagcacttatgtacggcggcggggagataggaacgggaggagggagcaagcggagggtcaaaatggcaagtctagtgtggagacgaggggaggagggagaggagaggaggcccccccgtcgtgtggacgcgagagaaaaatagaaccagcggagcgtgggggtgaggtgggggcggggatggcgagacgctgacgacgctgaggcaggcagcggcagcagcagccgggttgcgcggtcaaacggccggatggatgcgtgcgcgcttagtattttgttgcgttccgcgtcgccttttttttttttttttgccttggtgcgggtgaagtgcacagcagagaggaggggtcggtcaggtctctcttgggtcagaggcgccggtgcccgcttcctctcctccaccggtgcgccgtacgcgccgtgtgccggcgtggccgttatgatctctctccggtgatctacggggacggacgggacacggggggatcgagcggtcgggagatggcgaggccacgttgtgcaggccggggttgggctggcgtccgtgggcccatggtcagtgggcgagccgcgcgggtgtgggggccgtgtgatctgtatccgacgggttgcagtttggtgcagaattgaatgcgccccagagaaaacacaggatgcctcatacagagctccctagcctagccagtccatgacgctgggccccacggtagccgaagggcccacggtcagtgtctttcgccccacgcacgcgtagatccgggatgaggaggggggaggttatggaggcgggcgttaatgcagcgcgtagccactggccgcggcgtgggcggtgggtccggcggcccagtgaacggcggatgtggggcccgaccgcggatccgacggtgggggcggcgtcagcggcttgctccacacgaatattgaggcgcttcaatggtgttacagtaggtggaagggaaccgtcctggctggtccggctggctggctgggctggaccggggaggagctcgggggaggaggaggcgtctgcctcacgaccagctcggcctatctttcgtaccatccccatctttggagagtgtttaatttttgccatgctgcgatcgtttggtgtttctgttgctgtcaagatatcctacgacctgatatagaatcttcattggttgttcatgggtcagtaatcgcgtcataaacagggctggatgtggccaatcatcaggcatggtatgcccaattttgatcacagtccggctttccagtcttgtaggaagtgaagtttggatggacagcccctggttggtaggtaccaaatcttatctgtcgcttcatgtgacgcatgaattcgggttcatctgcattagcgtcatccaaacactttaacctatgtttcctgtatttggttagtgtttatctactccctccatccaaaataaatagatctatcatatcttgtcacagataaataggggataggtgaggagatattatttcccccgcatatcatgaaaatgagatgaactcgaaatgcaaagcctaatatgtacaagtagtgtgttattttactattgattatgtttgtgtcgtgctacaggattattaccggcttacacagtccctggaggtagatgtgaagttacaatcttaccccggaggatacataggaagttactacaatatccatgtcatgctaaaaacctaagggtatggttgtacatttatgtggtccccatatcttttggcgctagcttgcaagagtggttagagtggttcccgaggcatctttccaaggaatattcctcgctcgacgacatatcacaccactacttcatcatttcattaggaatcaaggatcttttcacaataccctctaagggatggttagtccaaggcataagcagatgggagaaggttggatatggatcatgaataagctgccggagttcattaatccagccattgtccttaagtgcttgccaatggatggtccttatttcccttccgatgcataaaaacgatttctaatcttcacgctccatcagccctatttgaatagcacttaatttcctcttgtagtaggctctaacacttctttccaagcgtcggttatttgaaatttatatgtctcatgagtcaaaaagtatttgctacaagtaaaacctttttggttagaagtacaagtcgagaagtatttaccataagtaaaaccctctttggttggtgagaaagaaaatgtttcggtcgaataggggatggagtttgtctcctgcttcaacacgaaataaacttgaaggacacctttagaacggtgattagaaaaggacatagaaattggacacggttgcttgtgtaaaatagggattataaaacaaataaagacttgtagatatcgtaaggtacactgttgaaaactttacatgcatgttaatgaatatactagaaagtaaagctatgataaatcaatacagtaagtctatggccatcacgtgatcgcacttcgcttgtcattcccacgacccacgggaagaaaaagaaaaagaaaaaaagctcatagtgcatgttttttcccccacgtttttccccttgaaatcgctcgagtaggaaactttcctttgcttttagtgactgattcaagtaaaccaaatggtgctatagtacctgaatccttaggatcttcaatctttttatttcctttgatttttcctctagtccaaaggacccctaacaataataggaaaagaccaaaatactcattattcattatcaatagaaaaatattagtgcgtggatagggtagataaaaggtattggagaaagatacaactgtcaaattttgtgggccgaggttaagtaagatagtagaaaccaatttatttgaaaaaaaataaaactctataaattaacttattttgcaacgcagggagtatgttcttccaatattccattatacaaccttgtttgttaccatgagcatgcaacatattttaaaaaacttggtattataaattactaaatttggatttaataaattgtaaaaaaaaagccataaaaagtatcatcaacagttgaaaaaaaaactaaatacatcttgaatatttataaatttcgaaattgataaaacctttttttttgtgttgagcgaagtgagcgtaactcaactgattagatttcttcaggtggaactagcccacctaagttcaagtcctatatttgacatgcgttttcgcatttacatgtatttattactatattggtcctatccagatttatggtactacgatttatctcatctactcaaaagttactatattttgcgacggatggagtatttaagtggtaggcaatgtacatatcgataacgaggcgtctgtggtgattttgaaaatatgatgaggtgtccatggtgacatcgaagatatgattttatcttcttcaaattatcgtgagaatttataggctttcttattagtgtgggaaattggatttatctcatccactcaaaagatactatatatattttatgacggagagagtatttaagtggtaggcgatgtacatatccgtcggtgagtttgaaaatatgatgagggcatgatgacattgaagatatgattttatcttcttcaaattatcatgagaatttataggatttcttattagtgtgggattttatagcctgttcacctttttaggattagttaatgtgacaaatgtaggagacctctaattaacatgcataaagattgggcattttgaggaaactcctacattaaccttaaaaatcttgcaattggttagaccaatggtgtgtttagatcgtatcgagagttggctttaaactaaatatgcaattgaaaaataccaagcactctttagttttagttgttctataatgataaataataatgtgaagttctatccatcttggctccgttcgggggagtttttttttggggcaataacaactgatgaactctagtatctctggctccgtcgataagtaactacataatcaaaagaaaataaatggttattttagattgatgttaaattatgccctaccaatttacacgctaaaactttcttcaccatatcaaatatatattggtagggaatcaaacatatataaaatatgaattccaccctatcaaagaataagtagcaacaaaatttagttagattttggccatagaattggtaggtcactaaaccaaacaagcccgaactagtggctataagctgagaaacatagctattttcatattttcaaaactcgttaaacaatggctttttctcggaatctctagctctctcaatcataatgtaaatttcgatagttataagctacaaaatatacaaaatggtttagtagacaaaagttgggtaacacggcttatttagattatcaccagttgggattcttactctttcctagaatcttcaattccccaaacaaggtcttgaactctaaatatattattttgttaatttgattctaattttataattagtaattaacaagttgtacctgatgctggctcttgttttagcttaagtccataatttaatatcttgccaatatatgtagtatataactaataatcataagtgctcccttcgtcccaaaatataataatttctagcatttagaatttatctcaaaatataacaatttctccaccaacattctcttctcaaccaataataaccctcgaccattcaaatttcccacctacttccacttcttttccaatcacagcactctcatttaatcataccaactttcttataagagcgagtacagtagcaggctataagtcagctgtaagcacatgtagaggagagaagagaaagagaaaaaaagcgggctacagatttgtagctagttgcaacacagtcaggtgtaaacacatgtggaggagagaagagagagaaataaagcgggctacagatttgtagctagctgcaacacggactccaatatgttgtgggtgtatgagagatgggaccatatattaatggtgtagtatatgctcataggtaactattgtataaatgagctattacattggttataaatgatttgaagctcactactaggaaaagcatttttgcaagcggccaaaaccaattttcgcaagcggaggggaggaccgcctgcagacggacgacggtgaaaatcatccattttcgcaagcgggcaaatggcccgcctgcgaaaatccaataaaaaacaaaaaaaaattgcctcgccgccaccgccgccgcagcaccgggagccaccgccgcagccctcccccggcctccctccggccggatctgggaggggaggccgggggagccgccgccgccgcgtacgcgcgccgccgccgccaccgtgtccgcgcgcgccgccgctgccttcccccggcctctctccggccggatctgggaggggaggccgaggagccgctgttgtcgcaccgggtcgccgccgcgttcgtgcgccgccgccgccaccgcgtccacgcgcgccgccgccgccctcccccggcctccctccatccggatctgggaggggaggccggggaaccacgtcgccgccgccctcccccggcctccctctggccagatctgggaggggaggccggggagccgccgtcgtgtccgcgcgcgccgctgctgccgctgccgcacgatccaccgccggtggagggagggagggaggggaggggaggggatgggggagctgagaagctggtggtggagggagagagagagagagagttgagaagatagaaatgagtggtagggacgggttggagtactagataaggtttgaagttttttttaggtagatacgatttttgcaggcggaccacataaggtgcgcggcgcggcttaggtggtccgcctgcgaaaatgattttcacaggcgccgcttaagtagtccacctgattttcgcaggcggacagcgaacttcacctcgatttatatttttgtaggcggtcattcgactcctaggctcatgtccgcctgagaaaaaaagacccctacgttgggaaaaatgctttttctagtagtggctagtagttggctacaaggttgtcagtatcccgattcgtatcctagtatcttacgatactacgatcctaccaagccaaaacgataccgatcccacctagtatcctaattttcatagtatctcgatcctactattcattactatacgatcctacgaaatcttatctggtatcccgattctacgatccctacgatactacaaaatattatttaaaataacatggtttgaaaataatgtaactaaatatgctcaaatttatatgaaaaatcggttaaatatatcaaaaccaacgtggtttctcttgataaatatctctatttgcatgatatatatcattactacattttttatatagaatggctatatataattaatataaatattaattaatttattaaaaagaaaatctcatagtatcccgatactacgatacgatcctacgatacgatattactttgagcaaaacgatactatgtagtatcccgatcccgatcctgacaacattggttggctatactattaaatttactttaactgtgtctaattataaaaatgcttatattctgttttgaagggagtaaaatactaataataatatcacgtgcgatatatggatttattactagtggccctaaatctgagacctgaatccagtggatatacaagcctaaacaaatagctccatgggaaaaatattactatacacataaaatttctgaacctgacctgtcacgatcctagatagactactccagttgattggaatttggaatttgtttaaataaaccagattgctgattatttatacctggaaagcaagtgacacatttcaccatcaatcaatgtgtacaggtatagcctctccaaccaagtctaatggcgagaaagaaaaacacgctcaaagacgaaagggacgcatgttttgatctggtatgggttttgacatggaccagtagcaatcttccaaaccatggccgaactcggtgaatcaacggaaagggaacgctcagatcctacttgagtagtgagtaagggggcacacatgggaaactgttttaaactctcgggtggacgttcacccgtttcttgcatgtcatttaaatggttatgaaaaattttcaaaaaaattgacataataggttaatatgcaatatatcacttcacaaacatgcaagtttaaattcgacttttacaagttgtaacaaaaataacaaatttaagtgtgaatatacgtataccggttagagtttgatttgttatttttgttacaacttgtagaagtcgaattttaacttgcatgtttgttaagtgatatattacatattaacctatcttgtgaatttttttttggattttttcataatcatttaggtggcatgcaagaaacgggtggatgtccatccgagagattagaatccatcctcagacacacatggataatgacgtgaatatatatatatatatatatatatatatatatatatatatatatatatatatatatatatatatatatataggctttttaattcctcgcgtcacttttgcagaggccgggctgctgttcttcgtatttattgcaccgtttttgctacgcgagaatatcaggaattcagaatacgacgtctgctaatgccgacattgtttggaagtcccagtgaagcgaaacgaagcgcccgtgaaaatgctcggaaggaagaaagaataatgttgtcgtaggctagctcacagcatgaatggctttagtgtggagtgtttttttttctttttagaactgtagtgtggagtgttgatatctacagctgtgtttagatcaaaccaaaattgaaattttgattaaaattaaaacaatgtgacggaaaagttgaaagtttatgtgtgtagaaaagttttgatatgatgaaaaagttaaaagtttaaagaaatattttaaaactaaacacggcctacgtactctcatacagttggaatgtatctttgtcagctccagagaccgacggttgggacttgggacctaagaccgtctccaacagcggagacccattctagatactcatatcatggattgggtgatgcacagtaaaaaggtcggacactcaaaaattcccttctccaacagcaaacccagtgctcccaatctttttctatcttcacctcgtcctcccgtcgtggcagcggcatcagcggagcaggcgggtcccagccctcgtctctcctccctcctccctccggcggccatcggctccaggtcgtcctcgcagcggcgatgcgcgccgttcatcctcacaggggcggagcggcgatggccaggcggaacgctcccgccggcggcttatggcgcggcccgtcctcgcgacggcgttgctcggggcggagtgcgcccgctggcggctcgcggcacgactccttgcgacggctgtggtcggggcggagcggcggtggcaggcggagcacacccgccggcggctcgcggcacagttcatcctcgtggcggcgatgctcggaacggagcagcgggaactgcgacgaccgcgctccaccgcggactcgccccgccggccgcactccgccctgacgccactacgggcccactacgcctcctccccgacggcgcgctccgacgacgctccccgacggtgctccccgacggcgcgctccgaccgcgccccgacggcgctcccgccccgccgcgggagctccgcctcgccgcaccagctccgcctcaccctggcccaccgcgcgactgcgcgagctccgttccagtgttttgcgtcggtagagagaggaaacggatatttgcctagcgctttggccgctacccaatatacgtatcgtatttgcctctcccgttggaggctgttttttttacccaaaatcagtgtgcacgacggataaatgagtatgcgtcgcgttgttggagacggtctaaaacgtttttaagctctgttgtaatttggcagaccagtggactgaacctgaaacgcacacatgattaattggtgtgtgttcagtcaaaaatactgtttggttgatgttttcagtcaagacaactgtttggttgactggctattttctgttttccactgtttgagtgggaagatgcagaaaaggagctgacagcttattactccctgttggcatgtttcctttcaggctttcagatgggtcgggcttgccaagctgggctgctctggataaatccgattccgatccgtattggaataagttcaccgaaggtcccttaaccacgaaacagaaatatctaccctaaactcacttaaaccgttcaatggaggtcccataacagttttttttcctggttttactaacgtaacatcctagtcaataaaataaaaaataaaaaagttattgggcccacatgtaagtgagaatgagaaaaaatgtgagacccatgtctcttcttttttctctttcttcttctacggcttgtttggtaacatgagagaaggggattgggagtttacacgagggaattaatggtgagattaagatgagaatttgattttttatcccagtctcttgtttggtagaggtggtggaaattgatagggagtttaattggagattaggttattaatgaaaacggatggctgagatttgtttaggccaagtaaaggaggaattccctcccaattcccaccccctacccaggtattaaaaaggagagagttcattcctcaattccccatccccatcccaccaaaattatcatgtctcccaatcaaacaaaacagttaatagcctcatccctccgaactcccaatccctcataaaaactctctccaaccaaacaggccgtatcttctcatttctttcctctctccctttttcgtttttctctttgcgacaggggagcagcagtgggcggcgacgagtggccggagcaggcgggcaagcgcgcgaggaccagcggagtggagtggggtggcggcggcggcgagcgagcgcgcggccggcagagaccagcgattgttccagtcctatacataaatcacagacggcttgtttggcaacctgagggaaggggattaggagtttacacgagggaattgatggagagattaagatgggaatttgatttttcatcccagtctcttgtttcgtagaggtggtggaaattgatagggagtttagttggagattagatcattaataaaaacggatggctgagatttgtttaggcgaagtaaaggaggaattccctcccaattacctgcccctactcaggtattgaaaatgagggagttcattcctcaattctccatccccatcacaccaaaattcccatgtcccccaatcaaacaaaacagttaatagcctcatcctttaaactcccaatcctcctagaaactccctccaacagactgagagaaacgaatgaacgaggcaaatagcaccttcttcatgttggcctccttggactcccacggcatgtcggagttgttttccggcgaatcgaggtgctgcacagcaagcaaacccacaaatccaactcactatcatcctcagacaaaacagacagatcagggaagagggtaggggtggatccgagggaaggggcgcctcacgtacgtagttaagcgccgtggagaatagcctggaggagcagcccgcggcggcgtaggagatctgcaacgagatgtttcccccaagggagagatcaggacggcaaagttccgcgacgaacagagagatacaggggcatttggagcggaggggctcccgccggcggcggcggcggccgtcggctcgctctgggcgtggctcgccgcccccctcctcctcaccggcgtccacgccgcctgctgccgccgctcgcccgctgcgccacccggcccccgccccccgcgtcccgctgactaggattgtgaccctactacatttttttctcgcttataggtgggtttcacatatttattttttatttttttactgactatgatgctatgttattaaaattggaataaaagacctgggaacggtttgagcagttttggttttatggaccttaaaaaatctcgctgttaagttaagagacctatggttaacttattccatccgaatttgttctgttgctcagcccagacatccgcagccgggggcatatcgtgcagcccaacaaaactagcgaccattgctttgcaggttgcagcttggctctttgccttccatctcccctatagaataggagacgacgcggctgcaggctcacacatgacgaccgccggcgtctcgacgaggagcagcgagcgcgtgcagccgtgcaggtgagtttccttttgccctaaccactaaatcctccaatttccaatctgcatataaatttcgtcctcttaaacaattttttttgtccttttaggtggtgttggaaataggcacacaagacaagagcccaggttatattcctagatccaacaatggtaaaaggaacataactagatgtccaactgcatgaagtcatagattatgtgaattggtgcttgtggagagaatgactatatcatattagcacatggtcattagtgaccactcatcattgaccggtcacctgttcagagatgagggttacaacccatcacagatgacttgttccgtagtagtgattgcatcaatccaaaatgacatagggtgtgtttgaggagaaggggattgaggagatacgcaaaacgaggtgagccattagctcatgattaattgagtattaactatttcaaatttcagaaatggattaatatgattttttaaagcaactttcctatagaatttttttacaaaaaacacaccgtttagtagtttgaaaaacgtgcacgcggaaaacgagaatcaatctcccctatctccccataacgaacagagccatagtatatattcaaccgcaagctctaatacattcataatccattatatgcatgtagacacaacatgtgggtacaatagacgactaaccactcatggaaacaatcaaacagacaacaagctcacaatgccttcaagtacaatttagctacaggtgcaaatacatctaaattactagtccaatattatggaggtgccctaaaacgacctcaagcttgagtgaagcttagtcttctagctttctttcttagcttactagttttcttccttgttttttatactcctcaatgttgaggcttggaatctaggaattcctgtaactggttggttgtgaatgcaaatcagctaatggatatataggcaagatttttatccattatctgaaaaaacgacctcaagctagtttccaactgacttcatcacctaattaagcatatgccatttctacattgattatttcttctttacttagctgcaactgcaaacacgctatatttttagggaaggagacggagagatcttccatgtcagttcttagggaagaactgaacatggaatccatctgggaagctgaggccgggggtacggactatgttacctccttttactgtcttccatctggaatgacaagatatatgcatatgttagaacatagatattctcatatgcatgccatgttcaggaagagaactacatgtacatgtgtgacaagtgatgatcagctgcatgtacctgtattttgtcaccaggtggtgtatgaaagttgcaatcaacaccttgctgagatcagttccaacacagaaacggaggccacctccaaaggccatgaaatgcttcgaaccaccggtgatctcaaccttgtcctgcgcaagcaaaacccagactcccagaggttagtcaaaactcaaaacacaagacatatgtttaatttctggtcacgaatgcatgcatgcatatgcaggctagctagctagctaacttctagaagcagattctactattatgggctgcctcctttctttattcctacgtgttccttatcagaagaacagtgagtgttaagtaacatttgacaatatatatctatgctgctctatatataacatgatttgaccaaccccacacgtaggccaatcaccttgcacaatgcaagattcatcccctagatcaaaaggcaagataggtttatttactcgcatcctgtatctatgtccccagtccactatttcttctctgctttcgttgggaatatgtgaaatatcacgtgcttcacctgccgcaacgaggaactgtctgattattagaaccctgaatcccagacatgctactgtgctagtacattacaggccggaaacagacacaatccgttgtaaaatatacaggggatttggtaaattctcccatggtgattgctcagtttgtttagctatttttgacaattgttttggttcaatttctttcttcctttttttttttgacagttgtggactgcaccatgcttgtatatactttgcctatccttccaagttgaagaaagctggggggactccagaattgatgccaacactgaatcaactgaatgttgggttcaataagtagtagttgtaattagtttattggaaaaaaggtaaggtgctttattgttgattaaagtggctatacttcagactagaacttgtgctttctgacactcatcacttggaatcctggaagaaataaaaacaagcaacaccatatatatgactgctacctgttgcactctatatatcttgggaatgagtccaacactcaatccagagagcatcaaaaccacaagtgttaattgcatctgaaacggttttgagggaatttcaattagttagcacatagattaaacggcacaaacctgccacctccatggattaaacgctaacggatcttcatatatttcgggatttaagtgcactgctggagggcacaccatgactccccatcctgctggaatggtgtagcctgcacccagaggtgtagaagaaaaaaaaaaggcttacattcatttttttttgtcaagttaaagagcacgtttgttcatacacatcatatgtatatctagcttgtaatactatacctttgaattcaatgtcctgcaaggccttccgaaaaatccccgggacgatgtttgctaaccttaccatctccaacgtgaccttcatatgcagaaaagttcaagtagtcaaaaatagtattcactcaactaatccattagtccctccaatttagtcccttttagtctctaagaatctaaacagggacaactaaaaagactaaaagtgcatattgggactaaaatccagtaatccatcctggaggtacttatagggactaaagtggcagcctctctcttctctctctcttggtttacatgcttttagtccctggatccaaactacagtaggggactaaagtttttaatccatgaactaattttatttagtctagagattaaatgatccaaacatgacctaaactgaagcaagtttattcagagcactactagttgtgaacacatatgtatataactacactatcttctctctcgtggagagtgcgcgggtgcacttggtttacacaagcacgaaacacaaagtaagcagttgcacaatcgcattggccagtgttctgcttgtactttgccactgtcacaactaagccaacaggccactggttaatccggctcaatgtcttatactattatacaccggccgttcaacttgcacttggctaattaactgctagctaactatagctagcccctggttaggctcacctgagacgtgaaggtcatcgacttgtaatctgcccacgtgaggcctgcggcatcacacccctccttcctgcccctaacaatcgcctcatgctcctcctgcgccacacaacacaagagctgtgtcatatgttgtctctcgttgattgcgcgtgtttggggtttcatcactggctaattagttagctgctaaccgttagcgcgtcgagcaccgtggggttctcggcgaggaggcggacgccgagcgtgagcgccagcgacgtggtctcgaagctggcgaagaggaggacgaacatgaggtcgagcgcgatgccctccgtcagcacgggcttctcccgccccagctcctcgatcagcacgtcgaagaagtcctcgcattgcctccccggctcctccatcctctccctcatcatcttcttcagcaccttcatcgcgttcctcctcccctgcacgcagcaaagatagcatcagctggtggctatagctaaattcaggcaagaagctagctagcgctgccttggtactgagccactctctagaaacattgactgcctgcaggctgcatgtggtggtgcgtgtgcatgcatggtcatctgttgactagggaacgcatgtgcaggcgttgttcagttcactacgttgctgctcaaggatgcattatattgtacatgcatgtgcactaacactacataccttcatgcactcatgatatgcagtgccggggatgtccaccgggaacgagatgagcccgcggatgaaggcgacgaagttcttcctcagattctccgacgactttgacggctcgtagctgatcagcttcttcgccgtaaggtcaaatatcatctagtatcacaagttcccagatcgatatatgtcagaactcagaaatggacagcatgagttccaaacatatattagcagcagggatacggatggattggtggtgatctcttacggcggagatgctgtccttgagctcgacgctgggctgcgccgcccatgaggcgaggctggtgcggcaggcgcggtcggtctcgtcgaggagcacggcgcggaggttctcctggccgtacagccggagcacgaggctcttgaggtacttgtacatgaagccgtggagggagccgacgttgtcgcggccgaagatctcggtgaaggtgtccgggtaccagctctcgaacagcttcccctcctgctggaacacgtagtagttcatctctgggtccgccgtcaccaccaccggcctcccgacgacgctggtcttgaagatactgccgtacctgcacagcacataatccaatatatctcgtcaggttcagtaatcagaaatcagctgctgaacaagtgtttttatctgtaaaatacaaaatgttacctgttcaacctctccttcacaaagggggagatgtcgcaggtagtgttgggtgcgaagaactgcaaggtctcgccgagaagagggaggccgagggagcccggaggcagccggccgtttgctctcgggtggctccatctgtacgcccacataacggaagccacgaccatggccatggccacagcccacacagctacacagaccagtgtttccatggcctctccaagacctggtttctcgcacactgctagggcaagaggcaatggcggtgcttagctaggctaggcaggcaagggaagctagtgaagatatggttttgcaagtaccgagagcagggtatatatagcagtgcgtgatctgaagggagattacttcggtttatataaagttcaggccagcataaacaaatggatcgaaggggagagtgcaggaggaattattgccacagaatccttccaagtgttcctctttttgacgggaagaatccacccggaagcttgcgctctgctgctgtgctacggagactgtgatgcatgccacaggaattcagctgttatgttctcagcttttcagatcggctgcctgtttaaggctggctggctggctctgtgtgcgcgcggtttagcatgaaaatttgataggcatgtacgtgttgcaacggattgccggctgttatccagaccgtgattgtattcttttctcactggtagagaagatgccattagcacatcagttcaaaatgttaagctgttatgtctgaatttttcctaccgtgtgtttccaatttcttaatttctcttggataggccccatttgagttagttaatttctgtgggaatgaaccgtggccccctatctactactaggaaaacatgacgcatacatgataattaactcgaaaaaatagcggcagacggataagaggggattgaatatgcaccggcacagaaaaaaaactacgatgtcccgatcaatcgagcgcgagtcaacaagagttcagctatatttcgtttttcttatccatggatacatctcacttgattgattggtcgttgtgatcagcgtgcatcgatcgatcgagcaagacgtctcgatcacaggtgtggtagacccagccgtccagctcccagctagctagctgcgaactgtgtgtgcatgtacactaaacgtcctttcgttccaacctgctttatactgatatcgacagctatatatgtcgatctactcctagcaggtagcctgaatccagcacagagggctcgttgcaatgttgcatacgaacgtacgtacgtactgtacgttcagaagcaagagatagatcagatcgatcgatgaagagatcgcggaatcttcccctgaactcatcagcagccgctagcttaattagctagctagatcacaattttagatgacctgatcatcaacttgatcctcatcactcgtcagtcgtcgcatcacatctcacatactactatatgagataattgtacatcaatgtgcttccacgtactacgtactgccacctgtatgtgtgtgtgccagtgtgtatgcatggcaatgcgagtctccggtctcttcaggttcgtcatgccatgcctgccgccatttttgtctgcatgtctgtcggtcgatcacccgtcggatcgagcttgttcagacaaattcagatgttcatgcatgcacctgaatgaattcctgcatataatcctactatatagtatgtgcgcacgtacgcgtgttcgttcgtggatggattggtcagacggatactgcaccgccggcgacgccagctctgcgactgaacgtatgaaaccgcgggacacgcccacgtataccgtatacgtacgaggtatgcacaaatgtcccccacacgtagacaagcgcgtattgacatatgagatcgatatacatgacattttcagagtggtgtagattcagactcgatcgagtagatgttccctagtttctgcgagcaccgtgagtccactcaagcaagtaatcaacgaattattattgtttccttcttgtctatatgtgtggctttcattcagatagagatcgatgagttcagaattcagaaatacaggacgggcgttgaggattcagatccaatccatgcgtgttcaggttccattttaagacgagcatatcctactcttccgaactcgttgaagggtgcatattcagaaggctgaatcctaagtatgtctcgtgatgctgttgttaattgtatcgttgttcgcgtggtcagttgttaaatccagcagtacacctgtaaaaagtctctgaaccacgagcatggatcccctgtagatacgcccgcacgatcgagtcgtttactctctacctactaccgtataatcgtaacaaaacaaggggaacagcagtttggatgacgatcgacagaagatccatgcaagtaccaagcgatctagctaaaataatttgttcatcgataactagatgccgcactaggtagctttttttaagataatagaatagagcatcccgacctttgctcaaagagttacagccaattattacaatctgtagcgcccgttccgtcgtggcgcctagcgggaaaaattatctcttaaaaaccctaattgcgaattttgtttccttgcttgttgtctagtgtccgtgccatctcaagatctcaatccccgatctatcgtcgagttcaaatccgaatccaaatccttccaaatcaaattcctccgcaaaagtctattttgcctcccccgggtcgatgggccgaatctcgctcggcccatctccctctctccctctcccgggcgctccctctctctctctctctctctctctcgccctctcccctccccggcgcgctccgctttcgcccccgctcagctccgctccgcctcgcccgcgcgccgcgcgcgcgtgcgcgagagccgcgccgcgtgctcctcctcctccgctctgcccgcgcgcgtgcgcgtgagccaccgcgccgagcgcccccttcccttctcctcgctctgccgcgcctgcgtaagccgccagcgccgagccaagtcctccctctctgctccctcgctgccgcttcccgcacgccgtgttcgcgtgcgcgcgcccgcgcggacgccgcccgttgcaagccgcgcgcgcgtgctgagtggccgaccgcccggtcgccgccgccgtcagcctctgcacgcgtctgtcgcccgtgtcgtcgcgccgctccaaaccgcccgccgtcatcgccgtcgtcaccgcccggcccccgccactccgcgcgcaagccgccaagggacggaggcagcgcccctcctccctctgtcgcgtcgcccccgctcccctcctcctttttcccgaatcggcaaaagggcaagcccctttctccccctcctttttcccctttttcccccgccggcgtcatcctccctgtcgccgctttggccgcgaccgccgagcgccagctcgcgccttgaccgccctaagtcggttcccaaaccgacattgccgccctctttaaaccccagctccttcccctccaatctccctcgttttcgcctcctcgccatagctgccgcccccgtgctctgttcgccgtcaccgttcgttgttgcgcgtgtcgaaggagttggcacgagcaaggacgcggaaggggacttcggccgcgccctctccttcctcttccccggcccgaggccggagagattactcccgcgccgtcggcctctcgtcacagcgcccctcctcatctcggtgatgcctccctccgttcttcctcctcgccccatctcctccctctagctttcggtagtagctcgagtagactccccgtagctagccggcgccgccccgacctttgccgtcgctcgccgcgtgctcgccgccgtcgccgctcgagctccgtagcacccgcacgtcgccagcctcgctcggcgtagctccgtccaatccgacgctagcatcggattcccgtggtcgcgtggatgctctcaccgccgggaatcggttcctcgtgacctcgtcggcgtttccctcttcccaccccgccggttgtcgccgccgcgattcgccgccgtcgaactccctctggcgaatccgacccgttggctcgtctcccctcatcacgaacaaccgcccggtgtgctagcttttgcccgtatcgccgtggttcgctccgccgcccgccgccgccgcccgccgtccattcgcggccgggtcgtcgtctacctcccgccggcccgcgtggcagccacgtaggcgccacgtcggcgccagctcagcctagaccaggtcgagccgaccccggtcagtccctccctgtgcgcgcgttccaccgcgagccgtgaggctgcgcgtgggcccgccgcatccgcgtccaccgtgaaccgcgcgcgtgcaccgcgtccctcccccgcccgcgcgcatgagccgcgtactccctccgcacggtgagccgagccgctgacaagcgggtcccacccgggaccgcgcatggtgagcccggtccaccggctctctctctcctccctcccgcgcgcgcgcgtcttgggccgccttgggccaccttcttgggccggccggcccgttaagctcggccgagccgccctttctctcgggccgcgccctagccgcccgagggaagtctatattccctccctctccctttttcttttcttttcttttccaaaaaggatttaattaaatccttttcctttagaccaaaaatccaataatcttagaaattcaatatcttcccaaccgtaaatccgtttgactccgttcaaattccaaaatttctcaaatctcgagatctatctaatggcacgcttagaggccattaatagggctttattttcgccgtttgttgagttgtcccgttttgcgtatagtttcggagcccgaagacccgcagtgcgaggatttcgaggatcaagctccagatctcgagcaaggcaagccacctttgaacatcttgagcctatatttgaaatctaattatattgcttgcaaaatattatgcattgataggattgcacttaatctgttgttccgtctgcaaggcagattggcagacctacctaacttgttgcatttgatccttccattgttaattgctataccatgtccccttgtaaccatccagttgcgcctcgatattcgtgcaccctgtgccagtatcgacgatcgccttcaaacttaaaatctgattaacaacttgggtaaaactggagttttacaaaaggcttggaaaacccgacacctgggtcggtgcttgcgaactaaatgaatttccaaaaccgcggaccgggcaacgtaccgggtgtacggtttcccgctctcgcacttaaggaccgattccttggaatttcatccaaacataagtcaagtacgaccacatgggtggaatgagacacccctggctgagtaactagcttatcaggggagccttgatgccgagagacatgtggattcgccggggtggtgtcggggaggacccctgggcttcctggcacagtatggtctgggacctaacctgttgttggtctgggacccatctcgtcggcatatggtaaacctatgtcggctttggaaatgccttgtcatgaaagcttggaggtctcccgacgtggctgatccccacgggctgggtgatccgggttagtaatgtcgtgtgggtaaagtgtaccccctctgcagaggttaacaaactgttcgaacagccgtgcccacggtcatgggcggatgtgaggtgattcctagcgtagtttggtttgactactgcttgtgaaattgctgtgtgaaaagggagttcggtgtttgaaaaatctgcagctgatgggatcagctaggcccggatggccgtttgaaaagttgttggcccgggtggccgttgaaaaagctattggccgggtgccaacattgtttaaattctaaagactgatacattgcacatactccgaccggacgagacgcactgtctcatccgtgtcgtttgagaagcactcacttagttgtttcagaaaagagtttaaataaaattaattgcaaaaacactagtctttccttgaagcctgcattaaacacttacttcccatggcttgctgagtactctcgtactcacccttgctctatataaataatccccccccagttgctgaagaagatgaaacggatcctgctgatgaggagttcttccaggagcaagccggctacgatgagttttagggtttcggcctagttcccaagtcgcgcctgtgttgattggtccaagtcctggcttccgctttccttttgtaatgcagttgtgagctcgggatctgtccgcagcccaacatgactgtacatctactctataataaagagacctctgttgctgtgatattctgtctccctgtgataccagcactgtttcctgggactggtatagattaacaggttaatttggagcgtcacgggctagttccggtcgggactagttcggggcgtgacacaatctcacactcaaaataagtgaagttcaaagaaacttaaaagatgaaaccaaccatcaagaagaaacaacctaaaaactgccaacccaaaataaagagtacacaattattgaattttgtttgtgaacctccatccaaaattgacaaaaagttgcataaccgttttctcaagaatacggcatgcagcctttaaaagctcactatcttcctcacacttttgtagttgtgcccaaaacaggagccaatgtgttgccctgaaaactacctttagtctgaaaactacctttagttttgccgcactaggtagctagctagcataccaatagtgcaagcaactgatgctagattgtgcctgcacaagtacagcactggcttaattcactgcgtattaggctatattagcttcgatacttctgctatgtgatgtacagtactaccctttccagttttgggcgaagcttagacaaaatctcagttcaaaaaactggggacaaatctcgatagaggtgctatacatgtgtggcattggctcgtcccatgtgatcaggctgggtaagaaatagtatgcaccttgttgggtttaaaattactagtacacaagtatatactcccaccgttattaatatacaatgccatcgacttttaaacatacaatcgatcattcatcttatttaatattttttgtaaacatactaaaatatagctagtacagtggtccgcacagattttgtagctagtatctttatattttctctcatatatgttaacaccaaaatttggtaaaattctttagtggattcggttaagaaaatagcacaatcagctgataaaaagcttatctagatttccagaagagtccgaattcaagaatgaatcatggagaccacggtatggcaacttaatttatccattaactaagcaagttttgtatttaggaaagtctgagtcatatccgatgaggactttatgttttttttctttttatccttaggaaagtttgtttagtgtccgatcaaaacatatatcttgccttttatctttaggaaatatgtgttgtgtccgatatggactagtatctacccatgggtataaatatgcacacacagggtctatgtaaaaatctctcgatcaatacaacttcgatgtatcgtcaccctttttattttcgtctttctcgatgagttcttgtttcgagttggactgcatcgattcgatctccgatgaggggtaaggcttgttatggttgtttgtatcggtggggtagggtctcaacactataatcttgtcgatgtaaacacctatttatcatatatcttaattaatctaggtcgatgtttcaatttacatgtatcggcggatctttttatagggttttgttggtatcagttaaattgtttcatcgatttagattagctaaggtatccatcaccctgaaaattaaccaaagacttaactgtttagactttatgcatcttttcatacttagtgttgcatcagttgagtttgatctactaagtcatgcttagaatcataaaaactaatctgcctttgattgtcgataaaggtttcatcggggtttctgccgatgagttatctggatgttgcatcagcttataagaattatatacaagttgattttagcctattataacaaaggtttcactgattatctaatcttgtggatttaatgttatcgaaacaccagccgagctatactttaaccttcagatcaagcaattattctatcatattatttgaccgattggtttctattgaattatattattgttttattacattatcatcagtcaattgctcaaaaacctatcgacatcggctggtatcgacatgggctagtgttgctatattggcttattggtcgatcggctcttttatcttgaattcatacatcttgtcagttgcaggatcaaattgacactagtggacaaaccatttttagtcagttgcccaaaaaccacaatagtcctggttgcttaaaaatccgggactaaaaatcatttttagtcccggtttaaaagcacaacgagactatatgaacacaaaccgggactaaagattatatttagtctcggttccgtttgtgccagatgatgtcagggcaccagaaataataaccaggactaaaaatggatctttagccccggttgatatcaccaaccgggactaaatatctccctcccacgtcctaccacatccttatctcttcgagaccgagaccaagtccttatctctcgcgcggccttcctcgcctctcgctctctttgttctctcttctctcgcctgcctctctctgtcgatctctgtatctttcctctcctctctcgctctctgggttagcggcggccgtgcggggtcggcagcggtggccgggctagggaggcgcatgcggcggcctcgcgctcccctccgccagattcggtggaaggcgaggcagcagcggccgggtggcggcggtggagtgacggcggccgatcagaggaatttgtttttttaggatttgtgataatttttttttgagaatttgtgatgtgttctgtgatgcgaatatgtgatgttttttcataatttgtgatgtattttttttagaatttgttatgtatttgatctgttatttggagatgtaatttggagttaatttggggatcatttgggaatgtagtgaaatcaatatgcaaagttaaaaacaattaaaaaaagaaaaaaaactagcaaccgaatctggctctgccatatttagtcccggttgataacactaaccgagactaaaaatggatttttaatctctgttatttcacctgggactagagatacaagatagtatctttagtctcggattcatgctactagttgcataaccggaactataagaggttacgaactagggtacgttaaagaccctttcttcagcagtgtgtctggcacatccacatcccattttaggacctacactggagttaaaagtaggtcttctaaacctttgtgttatttttcacgtcaacagcatgactactcggctactcctacgagtaatctcgccaacatctaggcctagaccctggtacctgcaacctgcgtggaaacgcagcaaaaccgcacatcaatcagcctggttttatttattcatcatttgacgcattgagatcgagctagctatttcacttagcttcaccttccccaatacttgctattagcttcatgtatgtaacatatgctttattaatttccgccgtcggagaatgaactcctccaccagggaaccgtgaggcccccctttgtgagttcggccgagggcagcgggtgagattcgagggcttggtgagcgaagctgtgtgatcttaagggggttagtcccctccaagacgatgagacaaaagaggtttatacaagttcgggccgctgagaagcgtaataccctactcctgtgcatgattgattgaatgtagaacacaagtgcttggggttgcaagacccaagcgccaattcgctcggaagtccccccctccaccaccaggcctggacctccttttatacctcaaggggttaccacatgggcccaaaaacctaacctagctccggtggagaagtattataatctttgcattaaatgtatgtcttgtctcttgacttgggaagccaagcacacatcgtcttgatgatggggcctgtcaaatcttgccgcctgacacgggaggtgcccctatcagtcaccatttaataggtgaagacttctgggctcctattacaccgggaaacgggagccttgctttgaccagagcgggaggaccgactccggctgggataagaggatgagaacctctcaccatcattatttgatgggatatgtcgggctgcatgtcgcctgacacacgcgatggtgcgcctgacatcttgggtcccatcagtcattcgaccggtcacagaccggttgagtgcactgcacaccgcattaaatgcggcgtggcacgaccgctcgggacgccataaatgcgggtaggtgggcacttggaggcggacacctaacccatcgtacatggtgacctagagaggggggtcgggggagcccgacccctagtcacgggagggggcggccgccgcccgacctcgggcccgatcccccctcggggggagccacgtggagcccggggcggccttctccctctagtctcggccagggagtggccgctgccctacttcgggcctgactcccctcgggggagggccacgtggcatcggggggcagcctcctccgactaatctttggggaaggagtggccgccaccccacctcaggcctgactcccctcgggggagggccacgtggcaacggggggcagcctcctccctctaaacctgatacccccgggcccatatcaccgacagccgcttgttatagttccgtttgtttatggttaattcagaatctagatcaacatactccatccgtccaaaaataaataaatttaggattgaatgtgacatattccagtacaacgaatctagataaatgtatgtctagatttgttatactatgatgtgtccaatactaagttggttttttatggaacggagggagtatctaccaaacacaaatctactctctccttcccaaattgatcattatataactgcatggacacggatttcatcggaatacaattaatgcagtatgggagaatgtgtgcacgctagggtgtaattggcatggggttttaatcaatgcatgcattgtgagagaatgtgtgtatggtgttatgattaatgtgttttaaattatccttggtcttggtgcacaaacttatattattaccccctccaatttcattttaattgacgttttggacaatgacacggtctacaagatatatctttgaccttatttttctattataatatatataataaataaatgtatgtttacttttattatagtgctttaaaagacaaatctatatatattattctagttcatttaaactaaatacttttaaagttattgatggtcaaagttataaaagtttgacctcaaccttgtctaaaacgttaattaatatggaaccagagggagtatcaatttaggaaggatggagtataaattaaggatttgactggtcttttgtgtgtagttgtgtgccaaatatatgtcacgatggcgtcgctatttcgtttgctctagagcaggtacaatagcaggctataagtcagctacaaacatattttaaggagataaataaggagagagaagagctgtgggctacagatttgtagccagctatagcatggactccaggacacagtgtgtgtatgaaaagtgggaccatgtattaatagtgtagtatgtaactattgtatgaatgagctattagattggctatagatgaattagagctagtagttggctatactattaaacttgctcttagacgcattgatggtttaggtgcgtttgtttgaatataaaaaaataatcttctcatttttcatgcgcacgtattttaaacggttaaatggtacacctttttataaaagattatattaatgtgattttcaattttaatgtaattaatatttaattaattatgtagtaataatttatcttgttccatctccttaatcttctgttcctctcctctcaagtatagagtcagacggtcaaagtcagaacgatgtgagaagtccctatgctggttatgggttggtcaaactactctactgaacacaactacgcagcacatatatatatatatatatatatatatatatatatatatatatatatatacacacgtgtacgtatatatgcgtgctttgcaccacacacgaccatagcatataacggtataaaaagcgtgtttttcacgggtagttgaatcaataatatgattacttatttgtaacgtaacctattagtgatatcgtactacctccatcccctaatataagcatattcactatttttttataacgtttgaccactcatcttatttaaaaaatttatgcaaatataaaaaaacaaaaagttgtacttaaagtatttaagataataaagtaagtcacaaataaaataaataataatttcatttttttaataagacgagtggtcaaactgtgtaagtaaaatattaaaatcccttatattaggagacgtagtgattatataactattcctaacaataaatcattttagatacattactccctcctccagtgagttctataatttttacaatgatgcattctccaaaacatatctttgattatatttttcattataatatatataataaaaaatatttacaataacttataaaataattaatatgatcaattgattaacttttgacccacggtatttcatgtataagaaaaatgagagggaaatggttaagatggagaaaagggacagactcacagacatatgtagttcaggtgaagcttcgtctctcctgttggtaggcgaccatatgtagacacaaggagtcgataaatggcgttttgaccataaagttcagatggattcacgtaaaacgcaagagtcgtttgaccatcatatatacgaagaagaaaagctaaagtactatagcccctggctgcgaacctgaagctgcaacttgcaaatctgcatgtccgaggagagacaggagcaagcaagcttctacacttagctgtctttttccctggatggagtaggtctactcggcatctatacacatcatcacctataaaagttatgcccaagtaaacagcaaaaacggggacatctttggtacactgaggctagctgttgagttggcaagtttggatcttacagttgctccggtgacagtgtgagacacgggcacacactacagacgcacaagtggccatatacaacatgcatatatatgctgatgtcttagctagctgaacacagtcagttcaacagagctgtcacttttgactcgtagcagagacaggccagacatcatgcaccatccgaaaagttattagtccaggctagctagttttcccatgctgcacccagttgcaacttgctgatgcatggcttcatgcacggcgtgtatgtgttctatagtacatataactatggcactttgcacactgttgccatggcagtgtcgaattttagcttacaagtgacatgatagaaaagcaagaagcttacaagccatgtcccaactgcaaggtacttgtgggctcatggtcagtgcaagtcgacattaaactacggcaacgagagattgcgatcgatcggagcactcactcatgcgttgttgggttttgttgcaagattcgtcaaagggaacctcggatataggcgccacgagccaatggccagcctccagtctaagcatgaaaaactaatgcaatttgcagggttgtatatggttattatttcctctgttttttgacttaagatccattggattctttcacacattatctagctcatgcacgtatatcattgagcatggctaccatgcggacattatatatctttatccggagcaatgctcacagacgagcgatgacacttcagaaattcagaaaaacttcagataacgcggttgtacacgcatcggttagcagagcataacatggacagactacagagtatgcagcagaatgcagagtcgtagcaacagacacggtttgatggataagccatcgatccttgtggttaaacttctccaagttgtcaaaatgacaagttggctttgcactggcacgtttcgacctggagaacctttggcatcttctgaacctcgtttatggagtacttggactcttggaggcgacgccctgtgtacgaagctaagatcgtcacctttctggagtagtgtactactgagtgcggttgtgcgaaggttgcgagattgcatgttcctggaggaattgacttagacacggatcacggttgggtttgccgagagattggtcaaatcaaacctcggatgcatgcgaataattaaccatgaaacagcgcaacttgcatgtctactgtagttgtataggggagtagtgcactggtagtatagttagcacattagttagtcacgatactttacgcaatttctaggatgttgagagaagatgaaagaaaaaaaaaggaaagatatgcgaagtgagtcgttagcacttgattaattaattatttattattttaaacttaaatattggataaatatgattttttaaaaaacaaaatttccatataattttttaaagaaaacacaccgtttagtatttcagaaaacgtgcgcattaaaaatgtttaataagagtcttcccagtcaatctgctaatctcgaacgctgagtgaattaaaattttacgtctcatattgaattttacgtatcagtgtacttttaaatattagcaaaatactcgtctcctgttatggaattaaaagaatcacatcgctcattgcaaagaagaaatctattttaaattttattgtttagttttagaattagttaaaaaaaatatattttagtaataaaaaattcaagcaggctcaattgatttgttattattgcacaatcgtttccctcctttgaagagccgcatcatcgattaatatcttagcgtaatagaagaaggcgctgtgtttttattttcgttttcttttaacttcagtagaacatttctcatattcacaaaccctggctatttctaattcaaatttcaaaccctgcacacctatttgaagaggagatgaataatgtggaaaagctagttggcgcgcgcgcgccgccaacgcgcatttttggcccacgcagcccgcgcgctctctctctctctccttttcttcgcttcgctgtttctttctctcttttttttctttttcgttggtacctttttttcgctgtttctttcttttttttttctttttcgttgtttctaccgtatcgtacataacgtaattagtttagattagttttttttactagtgattagtttactagtaatttttaaatctcgagttgaaaatttttaaacctcaagttgaaagttttcgaatatttcaaatctggatttgaaagttttcgaatctcgagttgaaagttttcaaatctcgagttaaaaatttttaaatctcaagttgaaagttttcaaaattttcaaatcttgacttgaaagttttcgaatctgatttgaaagttttcaaatcttgaattgaatttttcaaatccgagtggaaagtttttaaaatttgactttaaaatttaaatcttaaatcaaaagttttcaaatctgacttaaaaattttcaatctgttggtaaaaaaatctcccgaaattactcgttattagtagttaagcaggtgttaactaatagtactatagataattagggaggtgctcgctgctggcgcccacacgccagatagcagccccctgaataatgggcccacatgtcagaatttagggagttggtggtgttccaccaccagtgggctatcctgaatagattagctgggctgggatatcggcccaatgaaaaggtccattctatctgttcgataaggcccaattgacctgagaaaagcggcccggcaattgccatccggcatccctgcgtaattccggcgccggcgtgcatactgccgaaataactagaagacagaacatcaacttgccaaagccaaaaacaggttgattaccgcaggtaactataccaaggactgactgttgaaatcattagcaggcagcaggctgtgtagatcttggaacacttgtcactgctccatgctccaaacatgcagctgtgcaagcatttggactcttctccgaactttcaaaaggtgcgagagctagcttggggaaagtttcagatcagacttgtcaagagggggccgcctacactgtcaatgcgtctgtttcaaatcaattcatgtactcatgtaggagtaccttgcttctgggaccggttcttttctgaatctgttagcagacaatcgtcggtacggccacgagatctgttcttttctacctcagcaatttggaaccaaataattagtgtcacattttcttgtgatcaaacaaatgagacctttggaatgcaataacattcatccacggtgaaaacaggccgagcaaaatcttcgttttgctgtcaaaattgctgcagctatttcccccttttcatactcgcttggtgcaattctttcacgcatgaatccatggtaattggcaaaagcaagaacagatgctaaatgaatacccatgccgcgcatgccgctataactgcacaacgtataaactactcgtgcagcggacgaggaagcggacgaggaaggcgcgcgaggcgcgacgacgagccagccaacggacggtgtgatttgtgactagtgagcaagagtcgctgaagtcgccgctgataattgctaatcttgtggggtatgctcatatagaaaatataaggatctttatgaaaaagcacgtccatattacaaaaatcccccctcaatcggagccgctcaatcttaattggacggagtaggatcgctaccaacgatagccctaaatctgatggtgtctaaaacaaattaacaaataaactcaggaccttaatgaaaacgcaccaacgaaagccataaatctgatggtgtctaaaagaaattaccaaataaagtcaggaccttagtggaaacataccaaggatagccctaaatctgattgtgtctaaaagaaatctatctaataacctaatgctggctcttttgctagctttctatttgtccacgtggcgcctcttactttgaagaaaaatcataaatttaaaaaagcatctaacaatcatatgtgagaaaaaaatctagagaaaaatatcacatagagattccagagccttccaaaactatcttctcgttccaatcacacaaacttctactcatttgtcttctataaatatactatgcgtactcgatactactcctataacttataatctagagaaaaaaaaagtcacatatggattttagaggctgccaaaactctcttttcaatcacacgaacttctactcatttgacttctataaatataccacgcctactcgatactactcatataactctagaattatatagtaaactcaaaattattaagcaaaaaaacaaatataaaacaataaatttacattaattttccttctttacatataatatgcatactcgatactacttctataactctagaatataaattaaaaccaaaattattatgaaaaaaaatcaaaatattaaaaatttaatagtttgtttatgaaatcttcagttatggcataaggtgcatctagaatgacatcgtgcacccatttttacagcacgaaccattatcaacatgcgtactagaaaataaaacatttaaacaaatcattctaacttttttcgagtaaaaaatatggatatatgatagaaatagaaaaagaaaatataatacctagtctgccatcctatgatccggtttttcctaaactacaaactatacattctgtagcagaaaacgaatctcacaaactgttttttctcattatttcgccgcatgtggctcgtgcatgcgcatgattaacaaactcgtaacaacatgatctcaacaatctctcaccgcaggtggtttaacaaactcgttaacctcttagtgacgatctttctcaactggtgtgaaaatgagtgtccttatcacataaaactacccttcagcccttttaaaaagcaaaattataggaactccttatatattcctttaaaaatttgttaatgaaataaatataagcataacatcttactttatatttttctctttatatatttagaattattgtgttattatatgctaattaaactacaattttttttaaaaaaagatgtgcttcaaaatctcacaagaatccaataaatataacaatttatttcttttttcatatgtttttaaacctttactgaagagaagattatgcccctgaaacatttatcgattccttatatgcccctaatatatttttttatttacttatatacacattaattttgattttgatctctttcatatacttgtcgtcaattggtctgaccattaaataggtgtaaaatgccagttttacattggaacgtgtaaggaatatatgtagaggtttgtggaatactttgccgtcaattagtcattagttgaccatgtcagtttaactttgaatgtgtaaggaatatatgtagagatttgtggaatcttttgttgaaaatataattatttattatgtggccataatattcataagtttgtttcacgaggaagtattattttttgtcgttattaaaaatacttttccatgaataacaagtataataatgtcacaaatataaatatatagtcttatacactcccaacaatatgctcccttcattttttaatatattatatcgttaactttttaagagacgtttaatcatttgtcttattcaaatcatttactttattgtgacttgatttatcgtcaaatgttcttaaaatatgacttaatttttttatatttgtattaaaatttttgaataagataaaatatcaaatgtttataaaaaatagatggcatcatatattaaaaaacggaggtagtagtatacaaattttcatattactttcatgtctaaaaacaaatcaaacctttcaataataattaaacggtaagtaatgaaatgtgcatagaaaggatcaaaagtgatttaaatctcatagggtctaaaaggagaatatcaaatatgaaaaggactcatttggaaaacctccctccgctgcgcttgactactcaatcggaaccgcacatccgtgatcaaacgtctcattgataccccacacgtttcgtcggactcaccgtcgtcgttgcgctcgccgccgctggtcgatatacccgctgagtcgccgatatctccggcgcaaccgccgaggataccaaaacgtggcggtaacgctgatccatcgctccgtgccccgcctctcccgacttcccacagtggttcgggccgccggccgccttcccctaagccctagccacctgacgcacggcacggccgctgcgagcctgcgacgactgattttccttatatgcgggtattactttgcgcggaattcaattgtcagtggtccaaccaaacgacaggtacagcaagaagcctcctccgctcgccgtggttcagtggttagcaggggagaataattgaatacattcttcggagcctgttcaggtacgtaacctatctttctccactaacagcagcctacattattgtgagatttaagtaattagtactagcatgttgggcttgctgcgtcggccatcaatgcttgcaaatttatccttctgttgtcatttttgggtatccttatagctgtatttgcttgacaaattcctgtttcttggttaaaacgagtgtcgggaacgttttacacattggtacattttgttgctttacattcagtaactagtttatattctttcctgcattcagcacaaccatcttccattgactcagattcataatccagcgtattcactagtactattcagcatctaataacagaacatgtcaatcctatgcaaagcgacaacagtaacttctatttaccactcggcacgatttcgcgatcaagttaaaatctttgtaatatccaccccttcccatattctgccctgtattacacctaccaggcagtacaaatcttctatagtgctacagtccaaaagaacataaaaaaaccttaactgaagaaacgagctagaaatggcgacccgattacgggaacttctcaacaatgttgttgctgctggcttgcagtaattcaattcttcacactactgctgctattggtcttgctccttggctgtccagtacgtcttgacgaccaggaggatcttctcccggacgagcgggccatcttcatggtcgacgatctggctgtcccacctcatcccgtccgcggcgctcttcaccttcaccagcatgtccacgtcgtctctgatgatcaccgtgccctcgggcctcaggatcctgtccatctccagcaggatgatatccatctcgcacctgttacaaaaagcagtttgaaaattgccagctatcctcggtttgtcccgaactgaatgtgatgcaaacttttacgtgcattacctgttcttgtacaaggtgaagaccgagtccgcatggatgagatcgtacgtccgtggataagtggacatgccctcgcacctgcacgcagtgaatgcagatagagatgagaaggcgttgagcaacagccatcagccatggcaggcaccgacacccccgcgctgcaatcagtgagacagcaggggccatacccaccatgcatgtgggcgagagcgtacatggccatgacagtacagagcagagtactactacgtactaaccagtcctggtagcttccaatgagcccacgctcgtagaccaccccaagcgtggaggagttaccaacggtagggaccatgttcatgacccacaaggggtcgctggccaatgccgcggcgaaaccgccgaggccggcgttcatgtcgagcacattgcggtatcgtcctttctgctcgaactgattgatcacccccttgtagtgctgaatccgcttcctccacagctcggtgtcctgcacaaacgctttcgatgtcacgcccttgatgctacctctagatatcctgggcggcacggcggtgagccgctgcggccatttcttcagcgcgccaccagcgacctcgctggcgtctgagacctccgggagcggcgtcacgcaggcctccatcttgtcatacctaagtataaatcaatgttatagcaacgcgcgcaaccaacactagtgaaataattcgatgcggttctctgtgattaccatgccgcgtcggggtttttgtgggagcagaaaggcggggacttgcgggaggccttgcagctggcgtggttggcaggcttctgccagacagcgatgtcgccagcctccttgatcttcttccagcagaggctcctggcgacggcttcgatagcctgctgctcggcgttcaggtcctccttggtcctctcccaccctttccagtacttcttccagttgatcggcggcccggacaggatccagtaccctcccggccgcagaacacggtcaacctcgatcagatacaacccatctgcacattgacatgttcggtagtgaccaatgagagtgtattcggatgaagagatcatgagtgtgtatggtgatcgggcaatatgggatacactaccgtagaggtgccaggggatgaggcagcgggagcagtgcgccatgtcgaaggcgcgggccgggtaggtgaggcggttggaggcgagcacgccgatcatggccggcacgccgcgctccagcgcgaactgcacctgcgcctcgtgggagtcccgcggcgcgaaggacatggccaggatgtcgcgggacagcagatacgcgccccagctcgccacctgcaagggaccggcgcgccggacgccgacgcattagcacgttacatcagacagtcagcaggtcgacacttgtgcatgcatctacgagtactgaaatttcaccttaacggctgtgtttagattggcccaaagttttggaatttggttgaaattgaagacgatgtgactgaaaagttgtgtgtgtatgaaagatttgatgtgatggaaagttgaaagtttggaaaaaaaaaaactttggaactaatttgctagtgaagccagtaggtttcagtttacgcaagtgcaactagacaggcgctcttagaaatgcaatgcgaatatgataaagcatgtatgcaaatagtaagcggttcttaacattactgcaaaagagaaaaggaaaatcactatgcatccgttgaaaatcaggtgatggaatttttatcaagaaactttgtagcaccgactgacagtgaaaaaggacagccagctttcccattccatccatagtgtctggattgagcaaaactttttaccagcggagtttgttagcaggctgtcaggcacgagtactacccttcgtggcacaatcatgcgagcgaaaaaatcccaatcgaacaagatgccgaaccgtatcggagattcagagatgtttgtcaatacagacatacttaattgggaaaaaaggcatgattctgtcgctcgcaaaaaagaacaatatataatgcggtcttccagacctctttgacctccctgttgaccatgggatctctcccccattccccaatttgcactcttccaactaagatttaagcaagatttttcgcaaggagcaatgtgaaatgccagcgtcaatcgatttgctgtaagtaacgaagaggaagaaagctcatttgagcacttaccccgcagccggtgtcgagcgcggtgcggacggagccgtcgtggagcgggatgagcttcccaatgtcgtcgatgtacgcgtcggcgccgtgggggaacatggtcccgccgcctgggaacctgaacttgtcgccgtcgacgcgaatccagttctgcaccgccttctcgacggtgagctccttgtgcggcacattggcgaaccacgcgacgtcgcggctggcgggccacgggaacgggttgcggtacccggaaggcgccggcacgaggcagcgcagccgctcccgccccgtggggcagtgccgctcccggtacaccagccgctcccgcgggtaccgcagcgaccgcttcacgtcctcgcacggggtgtactccgagtacctggccgggcacgcctggtacctccgcgtcgccgccgaatccccggacgagctgagcacggcgccgtccgcggccgccgcgtggtgcgccgagaagtcgagcgcctgcccctgccccgcgggcgtccgcttccgcggccgcgtggcggagcgggtggtggcggtggtggtggtggtgcaggcgacagcggtggcgacggagacggaggatggggaggcggagggggaggagaagccaccgtgctgccacgcgccgaggaagtaggacgcggagcagaggagcgccacggtggcgatgggcaggaaggaggaggggcgccgcgcggcggcgggggagatgttcagcttggtggccgccgggcggacccccatgccgacagacagcctcagctccgcttcagctccccggagcgtgtgctgtctatggcgcgggccgtgcagtcgtgcactgcgctctgtggtgtggggttttaggtggcgaggcgggggggacacactgtcacgctgcccacaccacaccggttgtgtgaattgatgtgtttgattttttggtcatcaacggtggaccgaccgtgcttacgttgaactgctttgggatttgcgcatagggaacttagggaaggtcattacgttggggaaaattacttgacggtttgactactcctagagtccttgtgcttagcgtggctgcgtggtgtggtgggagtattccgagtacttgtgttttttagcttttggcagcgccggaatactagtatagcttcttgttactagattgagcttttctttactgcagacatgttaagcccgtgaagcactggatctcaatgctcatgtgattccctgcaagtttgagaaccttttgtgaatcggcatttgtctctactctctagtatcctagccaaggaggtacgcatcagttgtagaagggcgacgccagcatggaaacattcgctgatatgaggtagtagtatagtagcaaaattacgggacctcgtgctaatctctctctgttagtagtacttacgaatctagcgattatagtatatattttttcagagggatcttccggttttatccaccgttggaaacacagtacacgactgcacgaggggtcgggccgctcggcgcgcacatgggttgagcacttgggctggttcgcgaggagcatccaccaggtcaccaccaccttcaaccacagcaggcagaacagtatatatgcgtacactgtgtgctgcgccgtgcagccttcagtgaagcagcgcatctacgcatctgcaggcttggatctgaaactctttcttgggtcaggaacaattcaaagctactctgagtaggcagtaaccccacagtaatcattgagtccgatgcacacatgcagacaggcatggctggggccgagatacaagcagcggccggcagtgcccggagataagcgagaaagctgggagcggacgaccccgagcatgtgtcgctgctaccgatcgatcaacgaggtctcacggccatcgccgccagattcagattggcgttgtaccagagcaggcacgggtcatgtctggccccgtttggactttggagtaaaaaggatggagtcgttgtctgactatctatggtcttgtcgacgctaccgattagtttgggcacaccgtcgtgcatgcttcgagtggaagaccatgcttggcctgtaccggccgtgactgtcccaagctaacaagcttaggagatgggaatggagatcgtgccgccgtgcgagacccgtggattccgtggaacggtgccgccgccgtgccagcgcaatactttaccgtggaggcgaggattgcatcgaagtgagccattcgatgcggctaaacgaacatcgaacggttgctcacttttcccctggggaaaaggaaaaaagtttggagcaccgagatgcctgcggaatttttttcatttttaaatttttttcaattaatatttacagaaataatccatcggcgcaaaaaattacaaaaatagacgctgccaccctccactagggcgacaagctgacgtggcaaacgggggagggacgaacggtgacggcagacgggagagggagggttttttttgcacgaaaacccttgccgggctcccatgcaaaaaaaaagccaacccgggcctaatactttttggctagtactttttgcatatgggtcccttgccgccctctagggcccagatgcaaaaggtaccatccaaatactttttagggctgcgaaaattgcatttagccccttgccgcaaggggctaaatgcaattttcgcagatggcggcagatgccgccgtcgagccgctgtctgccacgtcagtttgccgccctccactagggtggcagggtttattttcgtaattttttacaccaatagattatttctgtaaatattaaaagaaaaaaatttaaaaatgaaaaaaattcgatgcctgcgagacaggagtcacgggccttcgcatagcacagcggcacagctcaccggagaatttcggcccagaactccagaagttaatgcgcagcacgcacacgcgcaggccaccgaatgcagcgcggtcgaatggaaaaggtccaatttacgctagctcagtagttttattcatgtccctcaactataaatcgaatatagaattatagagcgtctgtttttttaagagaagtgtacatttttacccagcttctacatttcagcaatttaaattgagaacttagcccctaaataaccaaatctgaaattcgctcttatggagatatagactcaaaaccttaagggtgaaacttaggtcactccaaccactagattacatgtcctttcgcatataaagcgtctagtaacttttaagaatcaatacaattaagttcatcactagcattgatgacagctttgactcttgtgttgccttgacttaggttttcctctcatatggacatgtggcacctacgtgacactagaagaaaaaaaaatagaaacaccaagagatccacatgtcaatgatcatctaattagaaaaaaaaaactaaaataaatatgttgggacccaacataaaatcttcttcattaccccttctctcccatcctcagttgtcatcactcgtcactcatcaaccctagacacaacgtgctccaagcgaggaggcaagcggcagtaggcaggagcttggtgtggccagtcagtaggaggtccttgagtcgatgcgcccttcactagacccaacccgccatggcatgggcgttgcctccttcttacatggttgacatcaattgagatcccctgtagtactgcatgtgtagtactgcagacaacctgcatccatattcttcaatctttctctctccaccacaagttcaaggacgtatctagggaggagacacatgtctagggtggcattggattttgagtttgtttattcaaaatgtgaaagttttgacttttctaatagacatttttttgcctcttgggtttaatacattctcttttacattttttcgcatgcagatacatattacgtatggatatacctattagttttttttaaaaaaaaatctcgggtacacattcgaataccttaaaatctagataggcctgcccctaccacacgtcggccacaaacaacaacggggacaaggcagagaatcagagatactcagtcgcctcaatacctccatcgccaccacgtggctcttcttgtcaaccttggcgcgaattgagagcttgacaatggtgaggtaggtgaccctggactcgacaaggttgacgcgactcgacggtcccgattccgggaacctccaccgctatagagagctcttgggttcgccgaggtgggctgatacctgtttttgcggtttaggacgcagatgaaacttgacacatatctgagggaccaaaattggacttcttccctgctgaatacaccagttcggtgatgggcctcggataactcacgttcccaggccgactgatgtcatagcccacacgaacttgggcacattttctccacgaggtccaaggtccaataggaccctccgccctccgccagcgaggcggcggccatggaaagcccaagaaaaataccgcgatctcgccgagcagcagccgcactcgcgcaccaagaacacggcgccaacttgtcccccgtttcagactttcagccgttcgcctcaccgatcgagccggtgcaccgtgaatgacgctaccagatcgccgctgggcgatggcatgataggccgccgatgatggaccatgcaaagcatgcagcacgtggtatattactgtattgatgaagcaggtgcctagctaagcttcaggtccacactcgatcgtcctgcctgccgatcgacgaccacatcttcctgcgtgcctgacctagaactgaaacgtaacagaagactcaatttagtattcgcatatgtggtttggcatgcatgcagcgtgctcacctcacctctgacatccagacgaagtaatggctccgtttcatgagttggaagcatgacagcttttagctggagtttcgtcacgaggaagctcgaatcgatggacagatgtgctaaggaatggggagaggagagccaattttgccctgagctaatgaccaagacagggagctctaataaaagagtcgaatcatgtcaaaatgggtggcggtgttactgttagttgtcaattcgctgatgtgcacagaacagagacacctaatttccacgtatataattaaacttggatttggagcaacacgtgaacgcatggtgatttaaataatgccatttaggctgtcgatctttgaataggccaaatgcacgtaggtacgaataacagcttagaaatttagcagcttggctaaacatataaacttcttttccggggaaatattttatcaattgctagctcgaaacattgttgcataagagacctcagcgtgcagtcaatattgttgctgagcaacgctggccaaattcttaaagaggagaaaaaaaaaaaggaagagaaatgttaccatcttaacaatgacgttgtcgagttttaggccctcgatgacgggaaaaagtatcacgacaaacaaatagcctggccttttaccagaaacaaccgagcagattgatagatagatattccctccgtctcataatgtaggattttaagtttttgcttataatgtttgagcacttgtcttattaaaaaaattgtgcaaatataaaaaataaaaagttgtgtttaaagtacttcggataataaagtaagtcataaagaaaataaataataattctaaaatttcttgaataagacgaatgattaaacagtacgagaaaaaacttaaaacccttatattataggacagatggagtacatggttaaatctcctgtgttgcgacaaggtatcccaatgaagttaggaacctcagctaaccaagaatctggcataacatgttggcacaattcatgattttttttttgcgtagcacgtggttgaatattttacccatccatttgacatttaatgtgttcagttctagaacttcgcctgtcgattatttgatccgtcagacacatctagagcaggaaagggattcaaatatgaagtctaaacgagaaaatgattaacatgtaattaattgatctttaattattacaactagcatgatgacccacgcagattgcgcggctagcatcattatattttctctcatataatagcatatatgttttcttattatattattcaaacaacataattttaaattttgcaataactttacaaaactactaatgtgtaatattcatattatattttatatacgtgttatttattaattatttttaatatcacattttagttatttgtaaattatgtatattcctatatggactctagactcgtcttttaatatttcttttttttaattctgaattttctgtaaattatatttctatatagactctatactcttcttccaatattatttatttttatttctgaatttttgttatttctaattgtattcctatgtggactctaaactcatctttcaatattctttattttttaatttcgaattccagttacttctaaattgtatttctataatgacttaaactcttcttcccatgtttttcttaatttcgaatgttagttattcgtaaattgtattttttatacggactcaaaactctacttttaattttattatgtttattccaaattttagttagtttaaattcctatatagactctattctctacttctaatatttctttttttttaatttcgaatttttttttcttaattgtatttctatatggactctatactctacttctaatattcatcatttttaattccgaatttcagttatttcctaattgtatttctatttggactctatactccacttctaatatttcttattgttaattccgaatttcagttatttcctaattgtatttctatatggactctagtctcctcttctaatatttcttttttttaattctgaatttcaactatttctaaattatatttctatatggactctagtctcctcttctaatattccttatttttttaattccaaatttcggctatttctaaattgtatttctatatggactctgctttttctttttctccgattaatgtgaaaatttctaggcaatgagagcgaacgtgcaggctgctttttctattcctttaataatataatagattttttaaaaagaaatctatttaattttaaaagcaaattctatataacaatttttcgtacaaaacatatcatttaattagcagtttgaaaagtgtggtaatgaaaattgtgaaagtagccaagtcgatccctactttagaacatgccctaagttctaatctgctactggagctttttatttttctagtttatcgtaacaatgtttttcaaactgttaaataatatatacttttacaaactttctatattaaagtttctttaataaatatataaatttatttttaagtctataataattaatacttaattaatcatatcctaactcaccttgctttacgtgcaacagaaaatctcctgtctaccacaccttcaaacggaaccaaacacatctgctcaatagccactctcagggctcctttcgaacagaattttggagtaattttgaaggattagatttatatgtggtcctttggaatgaaagaatatctctcatagatttctttgatattcattaggattgactcaaatcataggaaatttggaagattttcaatgtaaggttcaacctcttacatttttttttctgattcccgtgttttttctacgggacatctaattatttttttctatccatatgatacaactatacgttttgttttatccttatgttttaaaaatcatgcgttttaaatgagtactcaacagagaaaagggattgacttatgaaaatagagagaaaagggattgacttatgaagtatgaacacttgaaacaaacgtcgcaagcaaaagtttttctggctgttggatacttgaatttgcagcatagtttggtatagcccctccgtttccgttccatctcaagaataaaatattggagcatggcagaacgtgtttgataatatagtgctcattttgttttgttgcaatatctatctcgttctcacatgcccatttaaatgttagttagctgtggtccaaacgactattggatgagatcgttatcttgactccagggacagttttgttgcatttataaatatgtccctatggaaagcttactcctgtcctttgtccattttaatgtagaaaactagaactttttttataggatttgcatgtataagagttggctataaatcgaccataaacttatgtgaaagaaagaaaaaaaaaataagtaaccacataaactactcaaagacaatcttaccaccgaagatcacttttccaactcacttgttttgtttccgcatgcatgtttttcaaactattaagcaatacaatttttattaaaagatttctatataaaagttgatttaaaaatcatattaatccaatttaaattattttaagctaatatttaattaattatgcattaataaaccaacacgttttccgtgcagggagccccagtactcacttaaaaaaggccccttctttatggaacaatatttttctaacatgcaaaataatttacaaaatttcatgcaacaaacttttagcttataaaaaaaattacaaaactatatgaaaacattcaaactttgattaaaaaaaacaaagtaaaactgtacatataataacaaaatggcagtgaaaacgtactaaagcatttacaaattttcatgcgtctaaaattaaggaaatccctaataaatgtaatggtattttctgtatgtttctctaaatttcctagatcatcctgcttgaaatacataaattttgctgataaagaaattggaggtggcaactgacacagcgacaggcatcttgcctatctctaaaaaaacagccatctcgtacacgaattgagagttatccctgggtttcgtcatcattgttcatttcttttttttctttttttgaaataattgttccattcttatatcatgccaactcgccaagaaaaccaattcaaccgtacatccagaaatcacgtacagaccgtgtgttcataacttcataccccgctggtctttcaccttgacgtcgatacgctttcatcgtggtgtcgaaaacgtcgccgtctcacacgcgagtgagctccgaggccgggcttgtcggttcctgccagggcaaacccacccgcgcgcctctcgcgtcgacgtccccgaccgagctctcgtgccgcaccgagagcttccccctcgccgttcatacgctcccgggtcccggctgcagggagaagaggacagggaaagagcttgcgggcctccctcccgccgtcgtacgtccggtgcgcgtcacggtcagccgagcagcaccatgcaatcggccagtgggcgacgttcctccacgtccaagccggctcgcgcatcgtcctgcaccgtccgtccgtcggttaaatgcgccgaatggtcctcaaccttcttcggctgtgttttgttcaacgtaaaatttagattttagttaaaattgaaaatgatgaggctgaaaagttgtatgtgtatgacgggttaatatgatgaaaaagaactgaaatttcttcctcgtgttactgggcttaaattggtagtactacctcaggcggtccaaattattaattgtccccatcagatcgagtttttcttttggctggttttcaggttcaacactgtacagcatggtggcatgctgactcggcctagagctttcttcttgcttgcacacaatgaaagacccaaattgcccattcctcgaatattgtactccctacgtcttaatataaatacaaccaaatccagatataacgtactgttcagattcgtaattctaaaatatgtcacatctatatttgtttgttacacttatattgaaacgggggattaccttgaatagcggtcggaaccaccgggtaaattgtcggtttcccccaatgatttgtattttatgggtacgtaaacggaagtggagatatgtggaaatttttatctagctagacaggtccagtggtagttataaatattttttttcaattatagaaggcacgtaggtacacaccactacccataaccataaagtatgccccctaacatgaggtgtatttgctcaagtttttttacaactcacgcttaactcggtcttgtctccatgcacaacttatgctgcgttctatacccatggttctcaactttactctctcgttttccacgcgcacacttttcaaactgctaaacggtgcgttttttgtaaaaaaaattttataagaaagttgctaaaaaatcatattaatccatttttagaaaaaaacaaatacttaattaatcacgcgctaatcgctgctccgttttccatgccatggagcgagggttcactcccaaacacagccttagtacaagtgtacaacatcaaagtcaccatgctgcgtacgatgcgatggcaggtggtactacgctgctccattggacgttttagtagctacggggaccaacgtgacaaccgcatgaaaggccagggagcatatacagtgtgcatggacgtattcttccccgcacggccggcgcaacaaaccacgtttcccggattcaggtgcggtacagcctgggctgagaaaatgcagggcccatcgtgcccgtctcgtcgcgcacgcgtatccgctttcggctactcctctggtcatctcatcccggcaggggcggcgcattgcatttctagctactcgctgtgtggcttcagtgtgcaacgtccgggccgttgatatggttagctgcaccacagcatcactagcgatgccgtggcacacaacgccgtttccggtgaaacacgtggagcggttgatctcgactagcattgagtagtaccgttcgatgttgtgccagaaaaatgcggtcacataatgttcggcttacgtggtgcatcagaatttttggacgtacagctaatgcaaacatgtatgccactcaaaaatatttttctatatttagtttacatttatgtgtgggatattggtataaaaaatgttcattatatgatctggcagacataaaagcttacaggtttacaacaaaatttatagtgctatgtgtgttgtgagcgtccgtccgtgtttgtgatatgtttctgaaaaaaaattcattaatgtggataaaactgattcaaatggaccattattagtggcgcaacggaaaagttattttttctaatatatacagtctggtcctgggtgtcacttaggtggattatcttgtaaattatattcatagtttaggtccaaagcatgcatgtttgattggtcttaagcaccaatgtaaccagggccggccctgacgggtggcgagcagtgcaaccgctctgggccgcccccgatcgtagggccccccacccgcaccacatggcccctgcgatggccaaacaggaggcagcagagccacagtagtagcgtcgtagcgatttctatgcctaacagtcaacgttcctaattcctacgcgtacgcaagtcacgagattaacgccgcccgccgcgcacgatcgccagtcgttcatccgatcatccagtcctatccgttccccacccatgcgttgatcaattcaccggtatcgcatcggcgcatccgcgcgcctgccgccttgccgagttgccgtcggctgccgccaccagcagcgaccgcacgagcccataggccatatctgcaagtccgcaactactattgctgaactgctttgaagcctgatgatcaagaggaggtgagcagcgggctgcaaggagcagcaacaccaccacattgacatcgctgtctggtttattgaattttcaatttctattccgttgccatctgcaccttgcgcgctatgcttggtttatgtctctggttaattgttttggtagagtctagagatttggacttggagttggacgaagttgcggtagtgtgtctgttgccgactcactttatgcgtgcacctggccgtacatgatcaataaattggtaagattttaaattttgatttataacataatttatatgagttaaaccagtaaaccactattaataatatttttttcaattatctcaagccatttcatagagaaaaaagtattggatgaaattaatgtcaatatcatataccaatgacttcagaatggtgtatgaagaaaaatttgaaggtaacatacatgatgtttttcatatatattatttctaaatacaatttaattttttatcgataaaacccgtgtatatacctatttattgatcattatttagatggtatattaagggcccctatgttttgtttcgccctaggcccatacaaactcaggaccggccctggatgtagctggtcacgttggccgaaactttgtgtctgctcacactgtttcctgtgtgcacatctaaacatctattgtgctcccctcctcctataccgcattccgcatgaactccggctatcccgcatagtcaatagggagggcggcaattaggacaccactggcaatcattagcaagctgatgtgttttgggcaacgatttggatggcacacgatagacggtgtggtgcaatgccatcgtctgtgtgaaggcggatgatggacctcaactttgatgtgggtggcacgtgatatgcaccttttttttttgccacaatgggggtggcgcctaatatgcaattttttttttaccacggtagcttttggagggtgccgaatgcaaaatattgtccagcgtgaactactatatctgtgtccaggaccaacaaaaggtgatttggatttagttgcgatgcattgaatcataagtacacatttaaatatgtgacttacaatatcatagagctaagtgacacttcgatcaaagtttaaaaaccagccatgtatttccttctcttttctttttccttttttcttcggttcattctatttgggagcacctcacgttagacattggtgcatgatttaagacgatgcgtgtgtggtggccagcattttacccggagaaaaaaaaatctgcatattggcatatttcttgccactcgacgtcgttgctacaagctagtctacacacacaacatcagcaacagttacggagtatgtaattatggaatcgctttcaagttctcgtgctcctgctcaaataatcaatgcatggtgctacagtccatgcatatgcgtgcatcgaaatttcttcatctccctatttgctgatgttgaaatactagaaaagacacatcggttgctgttgtactgtcgtgtaacatgccaacatttgaaccacatactcagcaaactaaacctgccctcccgggaaacaagtggaagcaagggtttctaggctttgcttagccctaattgatgcagcaaacacgttctcaccgaacaattggtcggtttggacctgctctggtcgctgattaaatttgttggaccattaattcctgacgtttttcacgctcaccctttatgggatttactaaccaactgaagcttcgaatttagtatcgttcgatcctttccaagatccgtgcgttggtctcgattcacagtactcgtgcgtgtgcaacaaatatctcttgcttaaagtatgacctagcacatggcaaaatcatagatgaggaactactcaacggctcaaagtgctaccatgcatccttattttccactaccaccttttctatgttttactccctcggtcccacagattttagccattggttggtagattagtggtaaagataaaatattaaattttttatcatcgataaaaaatagttttttgaaagttgtagataagagctattgaagtataagatttcataatttgtaatgaattcaatgtaaacaatggttgtgaaaaattctaagaaaaataacaatgtataatatagtaacatcgatcattccaaaaaatgtaagcttaaattcgacctacatattaataaaacgagacaaattcgggtatgtatgaattgtccattcgctgaatttatattttttatatcataatgcatgagttaacattggaggaatggtatatacataagttgtatgagtgtaacaaagccatcgtttcgcttattcgtggaataagagaaacggcatatttacaaacgaaaagtaatttgtgaataaaacctttatatacgtgtttttagtgatctaaaagaaaaggctaaaaaataaacttcgatgaaaaaaactcaaaatcagctccaaatttaagattgaaaatttaaattttggttgataagtataagcataagaaaaagatgaggccgcaaattttataaagaatgttttgtaattatttagatggtttttaaataaataagagatatctcttatgtattgtttggttaatcccatccaagaaaaaattaagagaatttattttacatctattatgatgcgaaattattttcttctcaatcttctccaagtctcgagagttattcataaattgtagacggagatataaatgaacttctttttaaacaattttgaggtctagaaatgattttttatgaggaaatagtattaaagccagacggttaaacccaaatgaccgtgttaatttattgtacggtaggtcatcgacctgccaaatggtcatagaggcgtttccgcgtgtatatatatagcaggatgaagaggaagaggaagaggaaggcagagaagaggaacgagtcgtcttctccaaggcgtccgaaaaatctctccgttctctcgcaagccacagtacttcctactcctcctattcatgcccccggccccgaattggatacgctggttatttcagaacaaaagtcagtttagattcgactggaggcctaactggtggtaatttgaagcattttggttcgctttggggggccagtagaggcaaaaggtctgattttttttatcgaattggtcgcccttttgattggagaatcgtcaagctcggcgtgagagtttctttggcctgtgctcgcctgagagtagaaggctgtggttcttgctcggcaaaatttgggcttatccttaaatcggaaggcgtgggcagctaaattcacaaggaaagcttcagttacccacggaagaaggatttcccttctctctcagagactcggattggtgatggcccggcgctgaattgctctgaaatctgccgaaagcatcgatctttgtctccgaaagatcagggattgggccctcgtatccccaattcgccccacctccaagacggcggtcgggcttgtagatggggtcggggtcgagcatcctcggtgcggacggggaatggggggtgacgtcccttggagacatgccggagagctgcgtggcggcggtgctgctctaccttgatccgccggagatctgccaagtcgcccgcctcaaccgcgccttccgcggcgctgcctccgcagactgcgtctgggccgggaagctgcccgtcaactaccggtacctcctagcctttgcagctgccgctgatgacgaaggtggtgacggcggacacggtaatggcaagcgcagctcgcccagcagcaagaaggatattttcgcgcgcctatgtcgaccgactccattcgattttggcaacaaggtaatagagccaatttgttctttaatttctactaattaagattcaggtaatagagccaatttgttctttaatttctactaattaagattctatgctggtttattagagccgatttgctaatgtgtcatttatgtatgatgattaatttcttcaatgagggttgctctaaaaaaactgttcaacggggattggagttgttggggtttggggaatggaagacataatttgaccattacttgtttaggtttggtggattaatatatatatatatttggccttctgtttgcttgaaatgatctgtcatgagtaaagaacatccatcttgtggtttataggaattctggattgacaagaacaagggaggtatttgcttgtctatctcctcaaaggcaatggtgattacaggtatagatgaccggagatactggagccaacttgccacagaggaatcaaggtatttaccccttggtggctttgattttgcataactatcgtcttgtaggcgaataataaataattgttgaagaaaatatttgacctctgaaaatctgagttgaattaagagttatttggttatttggttttacttctcttcctgatgagttaaaatacatcaattgattgatttgcaaccaccccactaatacactattgtactaaccgtacaaccttgaaattttgttagcttgtttctgggtattagcatatctagtaagtgaaacatgcaggagtggttaattcgggcagcaatgttttggtgcagatgagaataattttctttgacctgaattctatgaaatttataagattacttaaacccattgaacttcttagttgggatatatgagttcagttgtattagagaaattctctccacttaacaggaaaaaaaaatcaagatttagtagcacatttccaaggttaatttacaagcccataatagttactttcggatttgtgcatcagtagagcacagaaacattctgttactgttctgtcatttgagatagaatgtatcttgaaacaatttgttatggttcgttcggtgtatgattcaaatgaataaattctggatcgaaaaaatagtatatatgtttaccttaaagcttgctttatttttttttaattgtggttacatgttttctacactatctaaccgttctatacatttttctcaacgtgcccatgttgccaaggactaccaactattccactaagagctctctaattttctttcatgttgtcagtcacactgacttaagcaatttgagatttaacttgtggaacgcctgattaaaagatttgctgtaatctggttagttccctagtgctttcagttctcactgctatttgcaagtactgcataaatttagaacatttcattatgtgatcacttctattgttgatagagacttttatcttggtaaattggagatgatttaggtccttattcgtatcatgcagattccaccatattgcctatcttcagcaaatttggtggcttgaggtagatggagagcttgatttttgcttccctgctggttcatacagcattttttttcggcttcatcttggacgaccatacaggcgcatgggccgccgtatttgtggaactgaacaagtccatgggtgggaagccaaacccacacggtttcagctctcaacttcagatgaacaacatgctacatcagaatattatctagaacaagaaggaagctggatactttatcatgttggtgattttgttgtactgaactcggacgagcttatgaagctcaagttctcaatgttgcagattgattgcacccatacgaaaggtggcttgtgcgttgattcagttttgatatatccaaaagggtatcggcatgaaaaggcaaatatagtgcacatgtagtgctgcagaatggttgcaatactccagcaacatgagacaattcagtggggtgtggctagctttttcctgtccgttctttcctgaaagtccatgtgtatatttttttccccttgagttttacatgatgtaaggccttttgtattcttttatagtgttagggtagggaagtaaagggcgagttttttttttaaaaaaaagaacttaaattggcatgataattgttgagtacagagtcctagtcgtttaaaagtagggacagatgccatcttcatatgtaatttttcatcagtgcaatgatgtttggcgatctggatattcctctttgcttattcccatggcttaaagctgattttatcttctcaactgtttgggtattcaacagctttcaggtgagcaaatggatggcagtaataaacttccagcatactagacctgtcgcccgcatatttttgcatagagcttaagctaattattctttcggttaatgataactgccttgtatattgctgccctagttctgaagattttgctgatcacaggatgccaggatgcatgtattctgcacgctgcatatcgtaggaattgctgtaacatttttatcgcatatgatcagatccaaaatccattggacttgggtcaacagacaaaatactgggtcctggaagtgttgtgaatctcaactgaattcctcattgttatctaatccttctgcaacggggcaagggtcaacgattgttttgggaacccatctcttgtatctgaactgttccagataatgcatcgtactgtattctatttagagattcaactgggcattcaaatactccgtcgagaaaggaagacgaagagattgttaacatggacagcatgatcgttaacaagtcaatcgaagtcccatagagaggagcgcaggcgcggcgcattgccgcggcgaagtcagcgatgagaaaattggtggaggatccataactgggttaagtactcaagtgcacagggcgaagccgtgaagggccggaatttattggtgtgcgagaagcccaggagaccccgggcttttgttctgcagtggaataagtccactgaccatcccttaacttcacagcaagtccgtatggcatatcccgcatccctaatccctaagaccctaacaccataaatcttgaccccttaagtcttcaaaaccatacaaaatagatccccaggcagtatagaccatatttcccactactttcgctgacatggcatatggcagggcccacttgtcagtgtgccgttgacgctgttactagacaaatcgacagcaaaattcggttttcggcgagcagaaggctgtagacgctggcggacaactggctctccagtgagttaccgaagtcgttcggccgcctcaccgagctcagcatcgtcaccttgtacaacaactcactggagggccctctgccaaaattgttgttcaagctcaagctagaacccgatggtgatcaatttctcccacaactgattcactggcgctgttgtgctgctcctcggctcgagctccctctccgtgctagctctgaccaacaacagattctccgatgtcatcccggtggtgcttgcgtggtcaaggtgcatggtccggctccagctgtccggcaaaaggctcgccggcacgatccctgccgagctgggcaagcagactgagctcaagatacttgaactcaacaacttctctggcgacattccgtcagagctctccaactactcgcggctcacccatctgaaccttgacggaacagcctaaccgacgccgtccctccgtggctcgatgacctttggttgctcggcgacctggacctctcctcgaacgtgctcaccggcggcattccagtggagcttagcgattgctctggcctgctcaagctgtccataagcggctttgggatcaggagcatcctgccggagatcgcaaagctggcatctctcaacattctgaacctgcagaagaatggcttcaccggcgttataccatcggagctccagcgctgcaacaggctgtacgagttgcggctgttggagaactcgctggaggggccaatcccgccagagctggggtagttgccgcttgccggagctgcaggtggtactggacctccctcgggatctctgtgttgagctcggcgaggcggccgaatgactccggcaactcgctagagaggcggttgtgcaacctccagcagtgcagcctcctgctcgctggaaactgttttttgctatcgatttgtctaacaacagcaccgacgacacactgagaagtgggcccgctatatgccacgtcagcaaaacaagggaaatatggtctatattggctttggtcatttgcactggctgcagcaagctgggtatactgttacagctgcataaaatgaacttgcattagggctggttgtagcagctacgctgttgcagctagcattaccaatcagcgccactaccattgggcttactttgcatggttttcaagatttgaggggtcaagatttttggtattaggaattagggatgccatacagactctgtgtgaagttgagggatggtcagtgaacttatgccttctgcagtagtttcagttcaacccatcctctcgagttttgggcttgggctgtcctgcaccctcgtgggccagaatacaactcggacattctccggatcatttgcaccccaacggttggggttattatcaaccaaactatcattaaagcaggtaaaaatacaacataaatatactaaaataccacatatatattttcacaaagttcagaaattaaaattttggtatgtcattccgatacgatgttggtgtgcaggtatatgattttttatttctatatgtacctatttaaaaaaaatacataatgcttatggtatattttttttcctgttgtccagctttccaaggcttgggcctcgccaacaccacttgagccggcaccaactcgtgatcgtgagcccgtcctcgctgactctcccgagtccctacgcccatcggttcctctgccatcactgcctagatttctcttcactactgcccgagctgccgccaacacagggcaagcttcgacatggccatcgccaagggtatcggtttttcacctctactttctccgcttagatcgtcttcaccaagctcctcacgcctattaacttgatgacacctaatatcaaaaggtatttattggctcaaatgagccacgggtcgtcgttaggccgttggtgctcctatggccacccgtcagcctcgtttataggtgggctgccccttacaccccgccctgactcctctccgacatcgtccgcatctttggcgtcctcccctaacctctgcgcttgagatgacgttgtccaattgttgctacctatataaggataaggggtagcctcctatgcctcgtgatccctcgatagctccgcggctccgtgtgggccgccaccagctgccacctgtcctcgagcgtgtcgtcgtcgtgtacttgagattggttgagggacatctgcccgtcctggtatgcttcacagcctttgttgcctcgctgctctcttgttgtgctctttactatgaacatgtgtttctgtcaacggaaaaaagagaatagattaggacttggtcatggcctagtgtgaaggactagaggggaacagttgcactgctaacttggtctatgtgccactgttgcactgcttatgttgtatcttttcctttgctattactctgttttttttccttttttttaaaaaaaaagagtttgggtttcggtattctgtatttctaaaattttcatttaataatttttaaaaaatattcattcgtcacaacacacgtgccatttttctagttagtgaaaaaaaatatttgaacatgattttagtgaagttatggatttgtcattgttttatgactctttgagcgtgtcttagaggtgaatttgtgagtgtcttgtgtatgtgtagtagtgtatacatatgcgtctttcatgtaattgcaaaaaagaaagaatatattttttacgcatactatcatttgatttttgagccacttgatttagattaaacccttcatattcattcacctttttcatataaactacattacctcctctaaccctaaccaaccgtcgccccatagctcctcgctgacatcaccaccgcttgtcagcgatgacctccactgcacaccctccttcccacgatcccactctccctcttcgttccccatcgaggaggttgtgatgccccgacaccaccattactgtgctagcccctggtgtgctctcgtctccatcaactgtcgtctcctaaacgcttgggcgttggtgccctcccacctacatcctctagcactagcggtggccctgtacctggagcctccatcattaattgtcacctccttaccaatcgagcctcacaactcgtagtctccaccgtcaaccgctctcctctgcccggtggccctagaagtgccactgccaccttattgttttcgaggtcatcaccatgttcttgccaccgttggacagccgtcggagttgttgggagtcgtcaaagctagagaaggagtctgcgcatgaaccttcaagctaatcaaacgattgtttgcagcattggatgtaaattctttgcaatactgctgatgcagtagcagtggctgacatgtgggtccagaatcacatgtaagtgcactagcagtacgacagacaatcttcactggttttatattggctttctacggcaagctggaataatcttatctaatactacctccgtttttttaatagaatgacgttattgaccttttgtcatatgtttgatcattcgactgattaaaaatccatgtaattataattttttttgttgtgagttgttttatcacacaaattactttagacattatttatatagcttatatatttgcataatttttttagaaatatgaatgatcaaaaatatgttcaaaagttaatagttaataacgtcatctattaaaaatatggagtaaaattaatatgcttcgtaatcatgtcaacccatgcatccgtactcacacgtacgatcacaaaggagaaaattccgttccaacttccaacctcagcacagcaccggcaaacttcaaaatatgtactccacacggttgatgacctttaagacacagggaaccacgctaggaaagcaaaagcggagcaaagcaaagaaaaagggccggtagaaatcaccgttcacaaggagtaatacacaccactcgattgttgtctcgggaggtaaaaaaaaatactgtcactatagtactaccatgtaccaccactgcaattctgtaccgagtccaggagtacttcaggatgctgagcaccggactgcatcactgcgctgtttcttgggttaatactagtagtacagcagcagcagctgagctttttaatttgccgcaccgccggccggtgattggacggatgtatttactacccaaaagaaacgcaattcagatccgtgcagtattgctcactgacatgtgggccccacagacccttgggcccacatgtcagtgagcagcactgaccctcgctcgtcccgcgagctgatggagcctttgttgcgctcgctaccttccggcctgaagggctgtagcatcgtcgtctcggccagcgaggagggcggcgcgacatcgcgctactcatcactgctccttcctgcagcaggcgaggcccctgcgactgcgagcgagtcgcgacgacggacggagggggccgcttcgcacgcgatctggtcgtgcgccgcgcaataaatcggtggggtgtccgcaggctggagggcgtttgatgaaaggctgccgccggatccgatcgctgccacgccgggtctaacgctttccctgttttgcctgcccgtgtccgtccgtgcctccgtggtcaccgtgcgtgttagtacgctcgctagctgccactgccaggtccggcaaatgccgtccgagtccctgcacaatggcgaatttcacgcgtgaacacgtaggggtgaaaacggtaacggtaattaccggccgaccggcattcgttttcgactttctaccggccgagccatatggaaatggtaatcgaccgaaacaaaaatggaaatggtaaaaaatatggaaatgaaaacggaaatggttttgctgttataccgatcgtttccgtatttaccgtattcttgcggaaattaccgtttcttataatatggtaattaccgtattctaaatatgtcgatattataggacatgtttatacttgacccacagcttatagattgaataactcttcaataaaatctctaacttttgtacatggctaaaatgaagttaatttataatttatatagtataagcttgaatttatgtatatatataacatacttatgtaaagttaaatatatgtttttatagtttaatgtttccgtatttgttaccggtttccgatctgtaccgacatgtttccgtccgtattgttccgtttccggttttccgatatcgttttcgtttccaactttaccgtttccgatttcatttccgagaaaaatatggttacggaaatggttgaggctgttttccgatcgtttctgaccgttttcatccctatgaacacgcagtgaatctttttatttggatcccaatgctcaaatagagatggatggagtagttcgtttgatctaacggcgacaactgtgggatcattacaccttatttatgctttgctgcaaaaggtacaaagagaacggcttattaagacgtcctttctgtatgttaaatgttgaaagctactccctctgtcccagtatagtggacgtttatttgaaaaattagtgcaaatataaaaaaaagataagttatatgtaaagtacttttaataataaagcaattgacaagcaaaataaataataatttcaaaattttttaaataaaattttttaaataagacgaatgatcaacaaatataaacaaaaactcaaaaaataataatatgggacggaggtagaagtagctacgagtgcttcggtacaacgtatgggggagattccggtcttgatagggattgataaacacgtttccttcgatatccccgatgcaccaacctggatagtttgtgtctaatgaagagtgtctgtgtatgttgcgtatactgtagagggttgtgcactagtgctagctacattcccagaaaacgtacacgccggtattcccagaaaaaaagaaatgctctactaactcgttgaccgattactatgaatgaactcggtttacattttttggtagggaagaaatctctgtatggacctgattttaataatgatacatccaaactaaaatcaccaaaaatgcgtgattttgggagtatatgggagaatattcttaagcttagtattagattcctcgcttttttgattgctagagacacaaaccatagaaggatatgtaagaatatacactgacatatgcggcctgactacagcgtgatatccagcaaaagcatataagacaactacggatggttggaaattccgtggagcttacttgccgtatataagattaaagaccagttttataaaggtcatgtatggagtttactattctcctgattattacaaaatttatattgttagtacgagattaagccaaatccacactcaagaattagcgtagattactatggaatattggataagatattctcactgacatcggcagagtttttctttttttttttttttaaaaaaagtcaaagcatcgtgcggtcctgcatatctatgggcttcttccaaattcaaggattttatagaattgttttaaaaagcgcttaccttttcaagtaacggagaaaaaaacatgccatgatccggaggtgtaacagtttctacactgctaattcaggaaatcgtcacatgaaaaaagcaattcaggaaatcgtcagggccttgtgtacaaaactaccacacctagattagatttgcacggcatcacatgtagtgcacgcgactcgcatcgcaaaaaaatttgggagaccacccacaaatcgctcgtcggcgagcgaatccaaaccaaatccttgttctagtcttgtatcacccgcatctgcgcgtccctctgcggcggcggcggcggcgacggcggcgatggggctggagatggaggggatggcggcggcgatcggcgtgtcggtgcccgtgctccgcttcctgctctgcttcgcggccaccatcccgacgggcctcatgtggcgggcggtgcccggcgccgcggggcggcacctctacgcggggctcaccggcgccgcgctttcctacctctcgttcggggccacatccaacctcctcttcgtcgtgcccatggcgttcgggtacctcgccatgctcctctgccgccggctcgcggggctcgtcaccttcctcggcgccttcggcttcctcatcgcatggtgatgaaactctcccccccttccatccgcttgtctccagggtttgcatactgctattgggtgattaggatcgaagaagccgtagctgcatgcctaatttggggttgacacacgagtaggacgagtagaaagagaaggctagggcagtttatttacaaaccagaggaatttttgaacggaggggtatgtggtgatgtggcggtgccagatttcatattcgagccgactcaaacgattttgactttttattactggtactcatgtggtcctacgtaacataagatttttaccgtgggaacagggtcttctattgaactccgcgtcgattcgcttgtatgcctgcaaacttcgaattggtgatcctgtgaagtttggaatgaataggttaatcatttgcttttctagtcctgttaactgcaaaaatataggagtgatggacttgcaataaaagctcattactactgcttggattgcatagtccacttatatttttatccgtagtttggtggcaaccctttgtgatgttttattgaaataacatagtaatgcatgctaatgtgaaaaacacatggtcaaatatgaaattttggttactgaacgtaaatgcaaggtagagatactctaggctgagattactatatcggaacattctgaagctccatatgcagtccaaaacagattttatagacctgctgtttttatgccatctttctctggtttctgccgtatctggcttcagaacagttcaggaaaggcccttgcatttacagtttattttgcagaaatctcattttattttcttggagtattagttccctgtgttcaattgcatgaggattgccactctccaatagcggcaattgatgattttccactcatgtctatgacacgtgggacaaggcccacatgcagtagtctatatgtggaaagtcgtcaaatggcctatggagaacgataaatcgtcagttttcctgataggtgttatgtccattaagtgctgatgtaaatatttcctggaattcactaattcatgtacatgcttattcatccatttgttactcgcttaatatttgcacctacgcactgatgaacagaagaaaagggatagcttttcatctatactagtttgggggttttttcgtcgtcttacccttcttagtgatccaccgcagtttatatttatgtgtatgaggtggaggttggtaagataaaattaggatatcggcctgctatcaattcttaaatagcacatcgttagtctcccaaggatttctgcattacactaaaatatggttcaagaatcgaaatcagcaatcacgcaagagatcttttactggtgttgcatctagtgtcctacgatgttcaagctagggttattgtgaatctgcaaggaatattgattttgttttacttggtgtcatgagagatgggattctgcagggtgaagcaacaagataaatcactgcaaaacagaaaagtgatgtgcaaaatagttgacaatgacagctgacaggagtggttcccaaatatccccaagcgttaagatgataatggtgctgtttgattcaccttaaattattttgttcagttgattgtaactgagtatgtcaactaaaagaaatgaagggatttagtttattcttgaaggaaacaatcaaacttggaactggtgatgttttatttgctgaatggcctattgatagattggcaatctgagtatctaaacccactccagtgactatgcagatataggtgttttcctattacaatctcattagtattagtgtttcctatatctctaaagaaattcatcctaaactgctgcaagtatctagtagggtctgccgatttggaatttcaaaatgagattgtgtcattccctgcataagcagtgtgaatcagaagcaatgatgttattctaatttcacgtagagagtaatcatgtcttctgctccctttatctcgtagagagtgcctgtcgatttggatttggaaatcctaagtttaccattctaatttcactcccatttatgttcatgccttctgctccctttctctggtccgctgattcgaaatttcaaaatgaggtcaggcatcctagataagcagtgtgaatcagaagcaatgatgctattgtaatttcactcccatttatgtcaggcttctccctttatctcatagagagtacctgccaatttggaaatcctaacgtttactaagttacctttttataaatgtgctccaatattaatgggctgagttctgtagtaagttttgcattattctcaaatcctgttttcttgccaaaagataaaacaatatggcaggctgtgatgccatgttgcaactagtacctaagatgatgcccgctttccattcttatgccattgcatgcgtcaaactaagcatctaacagagattaccaagaacctgattgagaccttaattggaaaaaaaaactgttattttccttcattcaatattctgatcagcagtctctgtcatcaagataagggagaaatatcaaacattccacaatcagattggatgctgtaaactgaagtatgcttatttcgaattcttaatacataactgatttctatttctagaaaccataatttctctgttggcgggatcctgataccgtgtcctctgtccgcactccgcaccctagtttcttgacttctttctggtacagtggtactaatgccatttttttggtggaacatggagcactatgatggaaagaaactactgtcagaattgggcaaaaacaaaatctagctaacatattagatgacatatccacgcaatatcaagaagatcagccaccaacaggcgatcatcatagtcctaaatattgtcgtgtttccactttacgccaactttgaagttagctaactcatcatctgaacatatatgtatttttatattaactattgtcctggcgttgtttactcacataaaagggtaaactataatatattgtcgtctagcgctttatttttctagtgtgctgttcgctattatttcctttatcttccgtaaaaaggtattcccttgtgcatatgcaaattttgaaaagcaaactgttagggaacaaaaatgtcttttggatctggatggggcttcttttacagactggtttaaacttaatccaatttattattaaaagtgtgttgtggactggaatgtggctggttggacacctgaagtgtgtgtttgtaacaagtgattttacagtccttgagtaggtactgataggtaccccattttatagtgtaaaatttggtacctcttgatacctccagtactagaaggtatgaaaatttgcactaaaaattttagtgcctcttgcctcttggtacctctcaagggctgtcaaatttctcatgtaacaaatctttttacctttaactcaatataaaatttggtgggctatcctttgccagctccttgtcttttcaagtgctatggacccattctaagtagtaggtcaaactgagtccacaccattaagactagggaaacatttgattgttaggaattatagttgcggtattaatgtattcaaatttagtcatgatttttgtcttggagatgcatggaaggaataataagcaaatgcagagatcctaacaggttttcatcctcttatacagtcacatgtactacatgagtggagatgcatggaaggagggtggcattgatgcaacaggtataatatagtgctctattgtttctcatacatatttcatatagttaaactatattcattggttaattttctacatcatttcgttctttttcttcggggaagtttttagaccatatctgatttacatatttgaaataagcatagaaaataagacatgtattgttttcagatccctagtattaccttatggaattttactcatctgtttttgctgccctgcttccttgtaattaaacactgttccacgaggatacggttcctcttttctagtaagaactagaccttccttttgagggtttagctataaaggcaacaaatttcataataacttaacttttgaggctacattttgtccattcaggttaaaacatcaaactttaggttttctggagaaggttttatttgtgtcacccctaagaaaaacattgtgctctgtttcaagtgtctttctggaattgatttttttctttttgcaatgcaggtgctttaatggttttaacattgaaaatcatttcatgtgcaataaactacagtgacggtatgttgaaggaagagggtttgcgtgatgcccagaaaaagtatcgtttggctaaacttccttctttgatcgaatattttggctactgcctctgctgtggcagccattttgctgggccagtatatgagatgaaagattatcttgaatatactgaacggaaaggagtaagtggcttttgtctgctttgtgtggatgatgttatgttttgtttattactgatattttcttgtctaaaacagttatgggccagcccaactccttcaccactattgcctactttgcgtgctctagttcaagctggcgcatgtatggggttatatttgtatctatcacctcaatttccactttcacggtttagcgagcccttatattatgagtggggtttctggcaccggctcttctatcagtacatgtcaggctttactgctcgttggaaatactactttatatggtcactttcagaagctgcaatcattatatctggtctgggttttagcggctggtctgattcatctcccccgaaagccaaatgggatcgtgcaaaaaatgttgatgttttaggtgtcgaattagctacaagtgcagttcagttgccgcttatgtggaacattcaagtgagcacatggctgcgatactgtaagttctgcatcctgatgaaatccatcatatcgtcaatattttttttaattttctttgttggatgatagaatgtttttttattgagtttaccatgtcggtatggaaagtgctgttgtgctttcccaaaatggatagcacgattttaaagcttactgaagatctgatcggcaatgacctattatgatccataattccacatcacttctacattatgtgcaattcagtttgcagaagagcatagaaacaatactctattaatatgtagtcttgttataagttaatttacagtttaagtgggagaagtctaaacttctaatatatgtgtttgacccttgaaattaactagttgagtaaggaaagtccatccacttgaattttattttgtgtaaaatctgggtatgcactaaacagtttgccttcttttaaactggataccattcgttcaagattactaataaatatgaattttgaaagcctgagccgatgatattcaatttgaatactattagttccataacactgattcaactatttcaattccactgttatttcagatgtttatgagaggttagttcagaaaggaaagaaacctggtttcctccagttgctgggtacacagacagtcagtgctgtctggcatgtaagttttatttttcatgaagattatattttgactttacttttttgtacttcttatcatctatagaatagcgccctgaacataattccatcaatacttgctatatgaaattagaatgctgtatatttagagcttctattgtcctagtgccctagtacccatctttccaagtagaggcaacacaagtaaattgtaaaatgtccttttcacttctgacatattctgatactgtattaaaaacttgttttctgacacttttctcataccaaggattaggtagtgcttaatatttttctaacttcatctcacatgaacatgttgaggcctggtttagttcccaactttttcttcaaacttccaacttttccatcacatcaaaactttcctacacacacaaacttccaacttttccgtcacattgttccgatttcaatcaaacttccaattttggcgtgaactaaacacaccctgagtgatctgattgtttctgttttacagggtctttatcccggatatatcatattctttgttcaatcagcattgatgataaatggttcaaaaggtagctctccctctctaatttcagccgctctaatttcctgagatgtactctattagttagaattatgaagttgtagttgatctgacattttcctcaatgcagtcatatacagatggcaacaagcagtcagcaatccagtcttccacgctatcctggtttttgtaaatttttcatacaccttgatggtccttaactactcatgtattgggttccaggtgagattgagcttctgaatcttgttttactttatagcaactgaaaaaaaaaagacttgtcagagtgtttgttgaaatgaatcctgaatgaaaatgttgcatttgcatacacacacaagaaaaaaaggtagataccattgttttgatccgtgcctttcatgactagtatatacatgtggtttttgtagtaacatttttagtttttactttatcaccatcttaagaaaagagcattgaagcctgaatggttctttaactaagtttaaacaatcgtgccactttagtgattttagtaccatgaagttatgaggttatgtaagagggcagcttaaactcaccaagcacacccgaagaaaatacactactgtagttgctgtcctattttattaataagaaaataccgtgggttgagttttgtgtctcttgacagtagttctagtattaccctgtaatgtgaaaagatgcctttcctctattgttttgtgtatagtttgtatttaccatgctgtatactcttcgtttcctccaggtactgagcttcaaggaaaccctagcatcctaccagagcgtatattatatcggcacaattgttcccattgtagttgtcttgctgggttatgttatcaagccagccaggccagtgaagccaaaggctcggaaggcagaatgagcaacaagttgacctggtcaagtggtcattacatataggagcgacgaagaacatttaatgacgataatgacgaactagtgtccagctattctactgtggaatttcgcaggagaatgtgatgactcacctcttaaagttctgaactcccttgtgattgatcaaacattaaaacgtggcactcccgttggatttttcttctatgttatgactactactacaactacataggatatcggccttgcgccttcggttgttgagttctcttctgaccgactgtcattcaaagcgatgtattttttatcaccttccctggcctggagccaaatggaggtgtgaatgggcatcatttcttggttcacatccaatgtgtccttaccaactgagctccaacaacactagcagtttagcgcccatgttttgactcatggcttactttgaacacaattttggtgccatgatagctaaactcgtggccaccgagtagccatatggcggtcatagactacttactgaatccggcgccctctgctggtcattttggtcttataaatggtgctacggaagtgcaaacctgtgggtggtctggtccaaactaatactcctactactatgccgcgtcgcagaggtggtaggtttggtgctggctggtggctgcgtcgtgtttgggtcccaggattcggcaacctgaaaatgccagccgtggtggtctgctctgtcaccccagggcggccagaaagggcagcgtagtgtgctacagtgctatgcagggaaaaggcgacgccagtgacacgacgtaacgtggcgttgatcaggtcatgaccaatgaccgatggcgtccagattcctggttgcaaaaactgcaatatacaacgagtcatgctgcactatctctagtgcaatgcaatgcggcgcatgctgcgtatacgtgcgaaagacaatctcctggcatcttttcccagagaaatggacggtctaatagtccggaccggcagccgctttttcaaacaataacgcaaaaagttctctagaaattcatggagctaatcgccactatacaattcccgagacaaatcaccttcgctagctacggtttctagacagcatttgtctctcccatatcgctttgatcgcggtgcgtgcaaaactgcaaattgcaatccgcgtccatgaattcaacgtttgcgacaccggctgggctacgggaagaagactcgatcgaccgcctaaaaatccggtcgttttcaactgtctcatctttgttgtgccggcgccgcaagagctgcacggtttcgccaccgtcttcgcgcacctggccgtgtctcacacggccgggccggggtggcacacacgcaccgcacgcgtccttgccgtattccacccggctaataaccgcagcagcatgggcgtattaccagtttaccaccaccagcagcagcagcgaccgtgcacgcaggcagagcgcaatgcagcgcgacgctagctggcgcgcgctccaccatcgcccaatcgcccatgccctggaggcctggaagcgtacgtcgtgcggtgcagccttgccggcctggttaattctgcagcggcatgcaggccacagttttgctagtataaaaaaagaaaggagaaaaaaaaactggccggcatggcatggcttggcgttggtgggtgggggatatattgacgggacagcggaccacctgagattcgcaacgagcgtgtcgtcgatcgatcggccggtggagttttgtggattccgtgcccaatcttttgtcaaaaacggccactttgcctctacagttacctgcactgccgccggccggctacctatagcttgggggtaccactctagctacccagctttgccaagcacaaattaacacacacacagctctgctcgttcctgacaccctgcatgacaccaccgcgtgctccccacagactcagcaacacgggagccaaaggggaaatcacctcagacaggctcaggctcaaggcaaggccgggccgcaggaggggtggccatcacgcacactcatcacatcacctgcgtacttactcgcggcacgtgcctagccccccctctctctgatccaccaatcgaacaggcgcgtcgtcgttggccccgagcgacgctgcacacatgtacagttccacctgaacgtgtacgtcaggtgcaggcgcgtgcgccaccacgtacgtactccggccactagctgatcactccgcgcgtgccaccgctcggccggacggctcagcagaggcgctcgctttgctcttgcttgcccgatagatcgctcgctcttcttttgcgccaaatgcgttgcacatcttgcattgcattgcatgcatgtatcgcagtctcgcagagctgatcaagccccagcccctacctataaaacactggcacggttacgtacgctggggtcgccttgtcgtcgccctcctgggtccagattcctcgcccgtttgggtcgtctcacgctggatcgatccggccgtgtcagggatcatagtctcagagatctgagtgttagtttatcagtagatcatgcatgcatcagcctgtgtactagactgtagacatgtctagctatgttcagtaagttttgaccacgacccctgttcttttacggagctgtatatagctagctagctagctacacaaacggcgagcgatatttttctaatttcctacagcaacaggatagtggatacatatatcgacatcgatgtaatccttggtgtattctacccctggacgacggttagcaattccctaaattaattaaccatcacattcacgtgtaaattaaaacggccacataataattcacaaagtccacggacctccatatatatatgtcgccactcgccacgtgtgctaagagtcacctgataaataaataaattgccattgcaaaacttactttggccggccgcaggctgcagctggtttcatctgattactagttcagataacgaaagcgaaatccacaacggcgacatatgaaaggaaccccgggccatatcggtgtgtgtggtgcgtgcatttgcatcgttttacatgatgcaagcgttttaattcattaaaatgtgattcgcgcgagcgcgcgcgagctgtccatctgccaaatgttcatatgcatatggcttcgaggttttcggtcatctattcgtacagtaattggatagagttggtagagctagctgacgtacgtgtcagatcagaggaaatgtagctgacaccggtggctgatcgtggtagcatcggtagtgtagtgtacgtacgtatcgccggcccagttgtattctactacctccgtctcaaaatgtagttatttctagcatagtactttgtcctaaaatgaagctattttttacctaccttctcctctcaaccaatcacaaccattctttttcacatactttctcttttcaaccaatcacacacctttttcaaccattctcacctactttcttaatacccgtgccaacttcaaaaatgcttacattttagaacggaggaagtagaaaataatacggtcctttggaattaatgtaggaaacccaaagcacagaaatcgagttgcatggtttctaaaaaaatagtaatacggaaaagaaagtttaaaaaattaagaggtttttatccactcaaaaatgattttatttgtaggttttaggctttccttttcacaggtggcataaattttcatccacatgtgaagatggctgaggccgtctcaaggtcacagatcagctctgagatgtgtccttaagaaatggataattgaacctacatctaaagagttctattaggttttgagctaggcggtaggtgtctactctatctatatatgttcagattcgtaatattagaatatgtcacatccgattctagatttactttttatagaacggagggagtatttccaaaccttaatcccatacatgccttctcatcccaattcttaattttcagctgaatggattatgtaattttgtgataataattgagagtataaatgaatggattaatatttataaagtaaaagttgtttaaaaatatttttaaaaactatatatatttttaaatttaatataaatcgtactgtttagaagtttgaaaaatatgttgatgataattcagaatacgtaagaggaaattaaagaacgtatcatatatatctatagtcacctgcggtcgtgcgaaccttgctggcacccaaattaatacccaatgctgtacccaaatttaagctcccgagagaagattcaattcaaatcctacacaagatcgagaggagaggtcaaaaggaaatttgcaaggggcctgcacacattaccaatttcctagtacatattatagtattaatacacaactccatcacccggccgcgacaacaaaatttcggccgcatgcatgcgaatgcaaacaccggaggcgccaaaagagaggcgctttcactggtgcaaatggcatttgcggcatatgcatgcatgcatgcacaacctgtgcgtcgtccgcatcgctgcaggccaaacacagccttgttaacgcccgcccaactttaaccagcgtataggtatcgacaaagccctatgcaccgccaagaaatatacagggacaagtgctcccaaaactccaaaagttcggtgtactcaactgctcctccatacatggatactatccccaatctgatagattatgacggaggcaatcatcaaattgaaggttatgcatgtaaagcttagcagctagcattgtgctgcgctctcgtttaactaagctggccggggtagatgctgttgaagatactctagcatatgtaggcatgagccacgcatctagctacccaaactcaacgtgagtatttgtctggactcgttctggacaatcaagagctttggacggcttgaattgcaccgtcgtccattgtatgcactcactgtttacttagtactctccttgttctataataaaccaatctaaattcgaatttgtttgtttaaatttgttgtattaaataatatttcattatatttcaggcatgtttattttgagatcattttatccagattcgttatattatactcccttctattctaaattgatcatcatatatatttatgcactaagaccaaggataatttaaatcgcatcaatcaagacaccgtacacacattctcctacatgcatcgattaaaacatcatccaattacaccctagcatgcacacattcttccatgctgtattaattatattacgatgaaatccgcaactatgtggttatacaatgattaatttgagaaattttggattccattatatgataatcaatttgggaaggagagagtatcttattttattttaggttggtttattatgaaacaaagagagtaacttatgaagctaccaatcaactctagcctacatatgcattttgcagggggaatccatccctggtaggatgatgacaagactctcccagggacccaaaaattcttgatggattctcccgttttataattaccgtataatatggtcacttgctcactagctagacagtagtcactagctaggtccattgcatgcatgctgcagccatgacatggacgcatctaacatggcatggacgcatcaagctagtagctcgatcgcggccggagtacaccttccgtctaaaaaaaaaaactttcgaaaataatctaaacaattgcttatcaaagtttcttcataaaatttgatacgtatttttatggaacggaacagagagagcatatgccactaactggatacgtactatctgcaagctagcgtccaattgcattatatcttcattaggcataggcacgttcgatcagttctctgcatgcgcatgcgatctcctgcaaagtgaatatgcagatgattcagatggatctccacgatcgatgcatgcatgcatggggtgttgtaccgtacgtgcgtgtggatgcatctgctcaatgtcgtcgcagacatgcatgtaccgttttcctgatttggcaacatgacacgattgcgttttgcaccgatcgcccctggtttggctataccatttgcaaaccccatagcctgtaattaatcatacttaattagcaacgttaatcgctatttgatttagctagcgacaagtggcagctaggccgcgaccttttagctagctaactagaatggtggccagatgcggtggacatattatttcctagatgcctagtatctagcagattttactagcttaggtctgattaaaatagtttcaagtgacctaaacgagcatgcatgatttgtggtggtgttggcggtagtgccggccattacactagcatgatcatttagtttagggatctcaagttactgcagctggaagttgtcaaatgcgaaagtgcaacctctttttttttagagactagcagtatcaatttcaaatgaaatgatactggtctaaacaaacctcttcattgtttttcatttcgatgcttctccgatcccttcaatcatttttgatgtttagaacaagactcgatcaccatttaaaactccgaccatcaataacatttttcatattttctcatatgctcaatgtaaagagacaaaacaattaccctctctttatttcttaatatatgatgccctgaacttttgacgtgacgtttgattgttcgttttattaaaaagttatataaatattatttattttgttataacttattttatctaaaaaagttataatcttaacttatatttttacatatttataataaaattttgaattagacgaatgatcaaatgttataaaaaagttagtggtgttaatatatataaaaacggaggtagtagtataagtcaaagagtatcaaccttatcgattaaggtgccaagatagttaaactaattcccactactaaagaatatatctaaaggaatatacatataatatatatggggaatattgtcacgccccgaactaatcccgaccggaactagcccgtgacgctccaaattaacctgttgatcgataccagtcccaggaaacagtgctggtatcacagggagacagaatatcacagcaacaacggtctctttattatagagtagagatacagtcatgttgggctacggacagatcccgagctcacaactgcattacaaaagggaaacggaaaccaggactaggaccaaccaacacaggcgcgacttgggaactaggccgaaaccctaaaactcatcgtagccggcttgctcctggaagaactcctcatcagcaggatccgcttcatcttcttcagcaactgggggggattatttatatagagcaagggtgagtacgggagtactcagcaagccaagggaaataagtgtttaatgcaggcttcaaggaaaggctgttgtttttgcagttgattttatttgaactcttttctaaaaacaactaagtgagtgcttctcaaacgacacggttgagacagtgcgtctcgtccggtcggagtatgtgcaatgtatcagtctttaaaatttgaaaacaaggttggcacccggccaacagcttttcaaacggccacccgggccaacaactttcaaacggccacccgggcctagctgatcccatcagctgcagattttacaaacatcgaacccctttccacaacagcaatttcacaagcagtagtcaaacaaaactacgctaggaatcacctcacatccgcccatgaccgtgggcatggctgtttgaacagtttgataacctctacagacggggtacactttacccacacgacattactaacccggatcacccagcccgtggggatcagccacgtcgggagacctccaagctttcatgacaaggcatttccaaagccgacacaggtttaccatatgccgacgagaggggtcccagaccaacaacaggttaggtcccagaccatactgtgccaggaagcccaagggtcctccccgacaccaccccggcgaatccacatgtctctcggcatcaaggctcccctgataagctagttactcagccaggggtgtcccattccacccatgtggtcgtacttgtcttatgtttggatgaaattccaaggaaacggtccttaagtgcaagagcggaaaaccgtacacccggtacgttccccggtccgcggtttcggaaattcatttagttcgcaagcaccgacccaggtgtcgggttttccaagtcttttgtaaaacccaagttttacccaagttgttactcagattttaagtttgaaggcgaccgtcgatactcgcacagagtgcacgaatatcgaggcgcaactagatggttacaaggggacatggtatcacaattaacaaaggaaggatcaaatgcaacaaattaggtaggtccgccaatctgccttgcagacgggacaacaggttaagtgcgatcctatcaatgcataatattttcaaacaacataattaaatttcaaatataggctcaagatgttcaaaggtggcttgccttgctcgagatctggagcttgatcctcgaaatcctcgcgctgcgggtcttcgggctccgaaactacacgcgaaacgggacaactcaacaaacggcgaaaataaagccctattaatgacctctaagcgtgccattagatagatctcgagatttgaggaattttggaagttgaacggagtcaaacggatttacggttgggaagatattgaatttctaagattattggatttttggtctaaaggaaaaggatttaattaaatcctttttgaaaaagaaaagaaaagaaaggaaaagagggagggaaaatagacttttcctcgggcggctagggcgtggcccgagagagatggggcggtccggccgagctaaatgggccggccggcccaaggcggcccaagcgcgcgcgcgggcggggaggagagagagggccggtggaccgggctcaccacgcgtggtcccgggtgggacccgcttgtcagcggctcggctcaccgtgcggagggagcacgcggcgcggcgctagggtgggggagggacgcggtgcacgcgcacgctcagggtggaacgcacgcacgggagggactgaccgggtcggcccgatccgatctcggccgagctggcgccgacgtggcgcctacgtggctgccacgcgggccggcgggaggtagacgacgacgccggccggaacggacggcggatgacagcggcgagcggcggagcgaaccacggcgataccgttgaaagcgagtacaccgggtggttgctcaggacgaggggagacgagccaacggctcggattcgccggagggagtccgtcggcggcggattgcggcggcggcaaccggcagagagaaaaggggaaaacggcgacgaggtcatgaggggccaattcccggcggtgagagcatctacgcggctatgggaatccgttgctagcgtcggattgggcggagctacgccgagcgaggccggcgacgagcggcgcttccgagctcgggcggcaacggcggcgagcacacggcgagcggcggcaacggccggggcggcgccggctagctacggggaggctactcgtgctactaccgaaaactaaaggggagagatggagcgaggaggaagaacggagggaggcactaccgtgcggatggggcgcagtgacgagaggccgacggcacgggagtaaactctccggcctcgggccggggaagaggaagaagagggcgcgcccggagtccccttccgcgtcctagtgcgcaccggctcctccggcacgcacgcgacgacgaacggcgacggcgaacaggggcgacagtggcggcgagagacgaaaacgagggagattggagggggaggggcttgggtttaaatgggcggcaatgtcggtttgggagaggggaaccgacattggacggtcaagccggcgagctggcgctccggctagcggccaaaacggcgacagaaggtgattccggcgagagggaaaaacagagaaaaaaaaggggagggaaagggggcttgtcccttgcctctttgggaaaaggaggaggggagcgggggcgacgcggcagagggagggggagctctgcctccgtcccttggcggcttgcgcgcggagaggcggggccgaggcgatgacgacggcgatgacggtggggcggtgtggagcggagcggcgacacgagcgacaggcgcggcagggggctgacggcggcagcgaccaggcagtcggccaccacggcacacgcgcgcggaaacaacgggcggcgcggtggtttgagcggcgcggctcaggcacgcgcgctggctagcgggatcgggcggctgcgcggacggcgcagacgcgacgcgggcgacgaccacgcgggcgcgcgcgtgaacgacgcgcggggagcggcagcgagggagcggaaaggaggactcggctcggcgcggccagatcacgcgcacgcgcgcgggcagggcgcgggcggagcggagggcgctcggcgcgacgctcgcgcacgcgcgcgcggcgcgcgggcggagcggagggggaggaagagagagagagagagagagagagagagagagcgccgggaggtagggggagatgggccaatagagattcggcccatcgaccccgggggaggcaaaatagacttttgcggagggattgatttggaaggatttggattcggaattggactcgacgatagatcggggattgagatccgagatggcacggacactagacaacaagcaaagaaacaaatttcgcaattagggtttttaagagataattttcccgctaggcgccacgacggaacgggcgctacagaccaacccccctaacaagaatctcgaccccgagattcagcacctaggggagcagctccgggaactctgcgcggagaagatcttctcgctcccaggttgcctcatcttcagaatggttgctccattggactttgtagaacttggtggtcttccttcgagtctgacgttctgcctctttaagaaccttgatcggtctttccttgcaggtcagattcttttccagctcgatattacccagggggacctgctcttctggaactcgaagacatttctttaactgggatacgtggaacacgttgtgcacatctgcgagaccttcaggtaactcaagctgataagccacttcgccacgtctggcggttatgaggtacaggccgatgtagcggggtgctaacttgccggacatcccaaacctcctcataccacggaggggtgatacccgcaggtacacatgatctcctttttcaaactcaaggtcacgcctccgattgtcagcgtaattcttttgacggttctgcgttgtctttaaacgttctcggattagcttaacttgttcttctgctgccttgagtatgtcaggaccgaatactagcgcttcgcccacctcattccagcacaagggagtatggcactttctcccgaacattgcctcattcggcgacatctgaatgctggcctgataactgttgttgtatgagaactccgcatacggcaaacaatgatcccaagtgccttcgaaatccagggcgcacgcacgtagcatgtcttctaggatttggtttaccctttcggtctgaccatcggtctgcggatggtaggccgtactaaaatttagatcggttccgagggcttcatgcaactgcttctagaaccttgaggtgaactgagtgcctcggtctgacacaattttcttgggacagccaaatctacatacgacatgggtcatgtagagttctgctagtttctttccatcaaaggtggttttcactggtacgaaataagctgatttcgtgagtcgatccacgattacccagatggagtcgtacccgctatgggttcttggccaaccggtgatgaaatccattccgatctcttcccatttccactcgggaatcggtaggggttgcagcagaccagctggcctctgatgctctgccttgactctttggcaaatgtcacacaaggctacgtattctgcgacatctcgcttcattccagcccactagaagtatgccttgatgtcttggtacatcttcgtacttcctggatgaatggagtaggcggactcatgagcttcctttaggatgagatctcttaactccttcttggtcggtacacagatgcgtggaccgcaccaaactgtgccttgatcgtctatggagaaattggtgtctttcttctcctgtattctttttattaattcttttatcccttcgtcgtctttctgagcttcccggatttgcgactctagggtaggctgcactgtcaagctggcagggacacctgactgtaccacggtcagcctcaacttctccaattctctgcacaggcgatcttggtcaggccgtatttgagctacattgcaataggccttgcgacttagcgcatcagcgaccacgttagctttaccggggtggtaatgaattccaagatcgtaatccttgattagttccaaccatcttctctgcctcatatttaactcggtctgagtgaagatgtacttaagacttttgtgatcggtgtatacttcacatctgttcccgattaaatattgcctccagatcttaagagcatgaaccacgactgccaactcgagatcatgggtgggataattgacttcatgaggcctgagctgcctggatgcataggccacaacctttcgttcttgcattaggacacatcctaagccttgtcttgatgcatcacagaagttctcgaaatcttttcggatatctggcaaggtgagaactggggcagtggtcaaccttttcttcatttcttgaaagctgtcttcacatgctgcagaccattgaaatttcttttccttctttaacagctcggtcataggtctggctagtttagagaatccttcaatgaatcttcgataatatccagctaagccaaggaagttgcgaatctctgacacattcttgggcgggttccaagcaagtacagcttcaaccttgctgggatctacttcgacaccgttggaggagatcacgtgcccaagaaatgctactcggtctaaccagaattcgcatttcgagaatttagcgaatagttgatgatttctgagcttttccattatcagccttaggtgttcagcatgttcttccttattcttggagtatatcaggatgtcatcgatgaacaccacgacaaactggtccaggtattacataaagattttgttcattaagttcatgaagaatgctggggcattggtgagtccgaaggacatcactgtgaactcatatagaccataacgcgttgagaaagcggacttcggaatatcttcaggtctgattttcagttggtggtaacctgacctcaagtcaattttagagaaaactcttgctcctttaagttgatcgaacaaatcgtcaatccgtggcaatgggtacttgttctttatagttacttcattcatggctctatagtcgattaccattctctcagagccatcctttttcttaaccagaagcactggggctctccaaggggatgagctaggtcgcacataacctttactctccaattcttcgatttgtcttttaacttctgctaactcattagctgccattcggtatggtctttttgcaattggtgcagtgcctggcgccagttctatggcgaactcaatctctcggtctggtggcatactcgttaattcttctgggaatacgtcgggatattcacagactatgggtaccgactgcaaggtggtgacttgtaaacaggttaggatagaccgacttgcggtaggggtgttagaggtaaagcggacttgctttcctccaggtccttgcaaggtgatggacttttcggcacaatctatctgtcctttgtgcttagccaaccaatccatccctaggatgatgtccaagctttgcgagtctaggactatcggtttggctaggaagtcaacttcctcaattctaaggttaacttccgggcatatttgagtcgcccttatattcctcccaggggaatgtactatcattggtacacgtaaattttgggttttccaaccgtttcttttcacaaaagcttgtgatatgaaagaatgggaagctcccgaatcaaagagaactattgcgggtacggagttgacagagaacatacccatcacaacgtctggagcatcctgagcggtctcagcttgaatgtggttcactcggcctcgaccaaagttgttggaagcacgtgaaccttgtccacttgcctgagagctaggacgagactgagctgccgctggagtaggagtcctggcagtgctgccattagcatgccctgagttggtgttggtaggattctgagggcactgtctagcatagtgacccatctggttgcaccggaaacactgaactgctgacggtccctgcggtgacttgaaagaggtaacactgtttggcgcagtattgccactaggggcacgctgctgtggctggggtgccggacggttcatctgaggacgaggggcgtagcctggctggcggttagcctgagttaccgactggtgatattgcatgggttgaccacagcgagggcgaggtgcgcctcgggaagaatttccctgatggtttgacttgcgtttcttgtattcttcggtagcctcttttctggcatcctcaagtagaagcgccttgttgatcatatgttgaaaagtggggaagtcatgagcaagcaactggagtctcattccaactgcgattcccttcaagaatttcctgatcttcttcttgtctgtgtccacttcctcaggggcgtaccgagccaacttgttgaacatacttaggtactcattgacactgctgttgccttgcttaagtctgttgaattcctctttcttcatgtcaatagtgctttcaggcacatgagctgcacggaaagccgtagcaaactcatcccaagcaatgttagtgggttcagagtgtgcattgcagtaattctcccaccaatctgcagcaggtcctcttagctagtgagaggcatagagcgtcttctcaacaggagtacactgcactaagttgagttttctatcaacatctttcagccaatcgtcagcctcgatgggctcgacgttctgagagaactctggcggacgagaccttagaaaatctgtcagcttggatctattgttgctcatgtgagggtggccatttccatgcgcattatgctgaaaaccggctacggctgcggctaatccttgcaagatttgtgtctgaaccgccatcaggtgctgcatgttgttttccacatgaggtggggaagggaggcgttcctctccagaattgtgactggcagtgcggtgagagcggtgagactgttccatctctgtattacgggaaactgtgcgatgcgagcggttgctgcggcggggttgctcaacttctgcgttgcgggaagcagtacggtgcgaacggttgctgtggtgagactgctcattagctgactcatgattttcttctggctcaactctaccttcttcaaaaccgaagcgggctggtgcacgagctgcacggcgggggcggctagccatctaaactcccagaagaaggcgaggtaagagtcagataagcacttaggagggcaaggagcaaagtaaatagcaactcagatagcacacactaggcataaactggatttttcaaatcataaaaacacctgatacaacgggtgtggacaagtcacagagctacgccgagcttgactgtgcgcacaccacctaggagaaccagactatcaaacaacacccacaacaaacacacgcacgcactacctcgccacgactccgaaagagttggcggtggaacaaaagagcctaacacgcggacggctgctgaagactacctcctctactcctcgtcggcctggctgcctcctgtggtcggctcctcagtcgaagaaacgtcgatcggctgacgcgaagggaccggcggaacctgtcgagggccggtagcagcacgggccgctggcggtgggggagctgggtagtggaaacggaacacggtggaagaaccaacaacacgcttctgcacggtgcggataaagcgtgggccacggcgggaggaagcaactggggtgtgtccgggggtgtaggaagggctaactgggtgtgggtagggggagtacactggtgagtacggcgcacgcgagctgggggagcgcggaccactgggagtgcgagcagagccgcgggagctgtgggaggacaggtggttggcatggcagaggcggcctgagtcccaagagatagtgtcaactgaggtgacaccctcctcggccagacgggcctccaaggcggcgtagcggcgggcaagggagcggtaagcctcaaggagtaggtcgtgctgagtggcctgagcctccgaaagctcaaccatgcgagtcagcactggctgagactcgctgtatggacaagggtacctggcgtccgcgtggccagaaggaaggcgtggaagctgccggaaggcggagcccccgagacggtggctgtagtcgtgggccaggcgacgaagcgtagtccaggagaggtcctggtacgcgatctggagagtgggcctggccacagtgaagtggtgcgggcgaaggccagctccgtgtatacctccacgggggtaaaggtacacagagagctcacagtgagagggaacacggtccacagagtaccctgtgtactcgggacacggaagccaaggaaacgggcgaggtcacgaagctgagcgacgtggtgaccctcaccaaaaccgtgggaactgaagctggcgttcactgccatctacaattttgaaagagggagaaagatcagtaaccattttagaaacaaactattgaaaataaagaaaacaaaagaatccttagcttttcgcaagtagttttgaacttagtatccttagggtcgtcctaaacgtcgggtttcgccctagggccaagcctgtgctctgataccatctcttgtcacgccccgaactaatcccgaccggaactagcccgtaacgctccaaattaacctgttgatcgataccagtcccaggaaacagtgctggtatcacagggagacagaatatcacagcaacagcggtctctttattatagagtagagatacagtcatgttgggctacggacagatcccgagctcacaactgcattacaaaagggaaacggaaaccaggactaggaccaaccaacacaggcacgacttgggaactaggccgaaaccctaaaactcatcgtagccggcttgctcctggaagaactcctcatcagcaggatccgcttcatcttcttcagcaactgggggggattatttatatagagcaagggtgagtacgggagtactcagcaagccaagggaaataagtgtttaatgcaggcttcaaggaaaggctgttgtttttgcagttgattttatttgaactcttttctaaaaacaactaagtgagtgcttctcaaacgacacggttgagacagtgcgtctcgtccggtcggagtatgtgcaatgtatcagtctttaaaatttgaaaacaaggttggcacccggccaacagcttttcaaacggccacccgggccaacaactttcaaacggccacccgggcctagctgatcccatcagctgcagattttacaaacatcgaacccctttccacaacagcaatttcacaagcagtagtcaaacaaaactacgctaggaatcacctcacatccgcccatgaccgtgggcacggctgttcgaacagtttgataacctctgcagagggggtacactttacccacacgacattactaacccggatcacccagcccgtggggatcagccacgtcgggagacctccaagctttcatgacaaggcatttccaaagccgacacaggtttaccatatgccgacgagaggggtcccagaccaacaacaggttaggtcccagaccatactgtgccaggaagcccaggggtcctccccgacaccaccccggcaaatccacatgtctctcggcatcaaggctcccctgataagctagttactcagccaggggtgtcccattccacccatgtggtcgtacttgtcttatgtttggatgaaattccaaggaaacggtccttaagtgcaagagcggaaaaccgtacacctggtacgttccccggtccgcggtttcggaaattcatttagttcgcaagcaccgacccaggtgtcgggttttccaagtcttttgtaaaacccaagttttacccaagttgttactcagattttaagtttgaagccgaccgtcgatactcgcatagagtgcacgaatatcgaggcgcaactagatggttacaaggggacatggtatcacaattaacaaaggaagaatcaaatacaacaaattaggtaggtccgccaatctgccttgcagacaggacaacaggttaagtgcgatcctatcaatgcataatattttcaaacaacataattaaatttcaaatataggctcaagatgttcaaaggtggcttgccttgctcgagatctggagcttgatcctcgaaatcctcgcgctgcgggtcttcgggctccgaaactacacgcgaaacgggacaactcaacaaacggcgaaaataaagccctattaatgacctctaagcgtgccattagatagatctcgagatttgaggaattttggaagttgaacagagtcaaacggatttacggttgggaagatattgaatttctaagattattggatttttggtctaaaggaaaaggatttaattaaatcctttttgaaaaagaaaagaaaagaaaggaaaagagggagggaaaatagacttttcctcgggcggctagggcgcggcccgagagagatggggcggtccggccgagctaaatgggccggccggcccaaggcggcccaagcgcgcgcgcgggggaggggaggagagagagggccggtggaccgggctcaccacgcgtggtcccgggtgggacccgcttgtcagcggctcggctcaccgtgcggagggagcacgcggcgcggcgctagggtgggggagggacgcggtgcacgcgcgcggttcgtggtggacgcggatgcggcgggcccacgcgcagcctcacggctcgcggtggaacgcgcgcatgggagggactgaccgggatcggcccgatccgatctcggccgagctggcgccgacgtggcgcctacgtggccgccacgcgggccggcgggaggtagacgacgacgccggccggaacggacggcggacgacagcggcgagcggcggagcgaaccacggcgataccggtgaaagcgagtacaccgggtggttgctcaggacgaggggagacgagccaacggctcggattcgccggagggagtccgtcggcggcggattgcggcggcggcaaccggcggagagaaaaggggaaaacggagacgaggtcacgaggggccaattcccggcggcgagagcatctacgcggctatgggaatccgttgctagcgtcggattgggcggagctacgccgagcgaggccggcgacgagcggcgcttccgagctcgggcggcgacggcggcgagacacggcgagcggtggcaacggccggggcggcgccggctagctacggggaggctactcgtgctactaccgaaaactaaaggggagagatggagcgaggaggaagaacggagggaggcactaccgtgcggacggggcgcagtgacgagaggccgacggcgcgggagtaaactctccggcctcgggccggggaagaggaagaagagggcgcgcccggagtccccttccgcgtcctagtgcgcaccggctcctccggcacgcacgcgacgatgaacggcgacggcgaacaggggcgacagtggcggcgagagacgaaaacgagggagattggagggggaggggcttgggtttaaatgggcggcaatgtcggtttgggagaggggaaccgacattggacggtcaagccggcgagctggcgctccggctagcggccaaaacggcgacagaaggtgatgccggcgagagggaaaaagagagaaaaaaaaaggggagggaaagggggcttgtcccttgcctctttgggaaaatgaggaggggagcgggggtgacgcggcagagggagggggagctctgcctccgtcccttggcggcttgcgcgcggagaggcggggccgaggcgatgacggcggggcggtgtggagcggagcggcgacacgagcgacaggtgcggcagggggctgacggcggcagcgaccaggcggtcggccaccacggcacgcgcgcgcggaaacaatgggcggcgcggctcgggcacgcgcgctggctagcgggatcgggcggctgcgcggacggcgcagacgcgacgcaggcgacgaccacgcgggcgcgcgcgcgaacgacgcgtggggagcggcagcgagggagcggaaaggaggactcggctcggcgcggccagctcacgcgcacgcgcgcgggcagggcgcgggcggagcggagggcgctcggcgcgacgctcgcgcacgcgcgcgcggcgcgcgggcggagcggagggggaggaagagagagagagagagagagcgccgggagggagggggagatgggccgagagagattcggcccatcgaccccgggggaggctaaatagacttttgcggagggattgatttggaaggatttggatccggaattggactcgacgatagatcggggattgagatccgagatggcacggacactagacaacaagcaaagaaacaaatttcgcaattagggtttttaagagataattttcccgctaggcgccacgacggaacgggcgctacaaatatgtcctaagatattccgttataatttacctaattgctcctatgtgggtcgtgcaagtgtagtgaagggtatagaaagggaatttttcccttccactcctttaaatatatccatgagtgaaccctagaagggattatcactcccattcatacccacaagacttggctgcctttctctctccacctctccttatccaaatggttatgcatggtctctaaatattctctatgtttgttactcactataatactgtatacagctgatttatctcaaaaatactatcgttgaatcatagatttatttgatcctataaacttattctaatataatcttgacggtcataattttacaagttcaacggaatcgtattctaaatatcaaatatttataaccagatcgaggtacataatattattattttttattcaaatatgtaaccaatataattatgttttatgtatataggcgtgacgacataattataattgcagaggacaattcatatgtgttgccaagagcaagcgttagggtgccagatggtgagctgctggagcatttgacctgccctctcatatacatatatggtgcatacttaattttgatttattatatatgctataatatataaggcctgagaaccacattttgtcaactcatagatacttgttaaaacagataggaggggttgacctatatatgatatagcgaagccagaaatgtcaacccaaagaactgttttaatctactgattaattagcacagctagctatatatatgcaggaaaataaggaaacatcgctgccattacacatgggaactcctagctagctagctaacaaaatcatgtgagaatcacgcattccaagccagtagcttggcctaaacatgcatgagactaacatgtatgcagccagttagaacacatccacgtgcacgtgaacgatttttagggtcatcttccagcaaggccggctgttctcgtcatggcctaatgaagggccatttgcattggccctcccagtactcacggtgtagtacattgcccgcgccggcagcgtacggcagattatatcgaaaactagccagagaacggcgcgcgtcgatctctgatcatcagttctcatcgccctcccatcatcagtcgtcagtcgtcacgcaccaaccaacgcgcgcgccgcctcaatgccaacgaacgacatcctatgccctggtaccaccaatttctctgcaaaactaaagatcaaactcagtaagatattactaattaatctctcctttccttttctgaatacattctattttaactttaaaattccgattatatgattttgatatgttttttttttcactactattcatttgatcatctccttcgaatcacctagtgatatcagattgtaggatttggtactgtttgacatgactccaacttgtagattattcatgtagaaaatggagtttacatataaaactaaaataactcaatcggttaaacctctcattttgtttaaactatgaacagtgtttcgtcatgatatttttaagctatcatcagcttcaactacaagaattttttaagctagatatacgtagctgcaacaaaatttagagttggagctatgtcaaacacgacaaactaaagtatttgtatgcttgttcctttttgtttgtcatttatttttgtgtgttattttaggatattcacaatgtgtcctctctctctctctctctctctctctatatatatatatatatatatatatatatatatatatatatatatatatatatatatatatatatatatatatatataggacactcatatggggcaccatggtttcaaatgcacaaaatcactcaaatttttcaaaaatttcaaattgtgagtatatacctagttataagaattcgattcatacctataactatcaacaaaacaactcaaatttaactttatttcacaatccatgattacatacctaactaattatatgtatggatgctatatacctagaatcaaaatctaacacaaaacaagttcaaattcagttcaaacttgctttcaactagttagtaaagtagttaatattaatacctaaataattgaaaaagtttcatgctcatttgaattgggtatatactcaatttcaacaatggtgcccgggcaccatggagcaccaaacaaatttactatatatatatatatatatatatatatatatatatatatatatatatatatatatatatatatatccccatttttggactaaaactatagagtatatttatttccatttacttttatttatcatttaggacattcacacggtattgatatgcccgtatgcaaatctagtcgtttacttttctatctgcgttgtgagattaaggattagtagtacatcttgcgtagtgccacaagctgatctctcaaacaggtccgatatatcttcattcatttttgtgtgttatttaggatactcacgcggtgtcctagctatatgcccctctggccattgctttttctaaccaaactatatttttaaggtttgattgaacctattccaaattaaacaaatttgtttggagttaggctgtgttcggcatctctggttcccaaccagaacagaacagtacgcacagaaaacggagcagtccattagcgcgtgattaattaagttttagtttttttttcaaaaattaattgatttgattttttagcaactttcatatagaaactttttttaaaaaacacatcgtttagtagttttagaagcgcgtgcataaaaacacgagggagaggggttgggaacttgagcaaagaacacagtcttaataccccacaatactggaacaacagatagcatgatgactacacagtacacatatgctctttgcggtggtttggtaaaacactaataagtcatctatcccggtgagggaatggaacacaattacgttgcagtattcccttcgttctaaaataggtatagttttatactgtttatatccaacgtttgaccgtttgttttatttgaaattttttatgattattatatttgttgatattacatgataaaatatgaacaatactttatgtgtgatttttatttatttttttcataaacttttttaaataagacggacggttaaatattggacacggatacctactgcagtttcgtttattttaggacggaggtagcagtggatggccaagcgtgtgcttaagaaaagacggcaacaaacgcactaataagttccgatcgttgaatgttgaaaactaaggatgtatagtgtttgatactagaatgatagaaactactagaaaagaaatagaaatagaattggtgggcccatatcggcatcctatataaagccccctgagcacggcgtatccccctcgcaccaaccaaacaagctgttttttgtcaaccattcctctgctcctcccccggcctggggagtggagcgccaaatcgtccatcgcgagctagcctccgaaccggagacaagaagcgccccacgcccacgcgcgtgcgtttccgagccgaaacgtaacgcccccgcgcggcgcgttgcgttgttccacctgtttcggctatgtcgtcgccgcgccgagatggccgtggcgcggtcgacgacctcacggcgtccttgctccacaagggggatggtggggaggcggtgttcgtcgtcgtcgttgttcccccggtggcggaggaggaggagccgccgccggtgctcacgtgcaagccgcctggacggtttgctagagcggtgaaggaagcctggtccgtcccgttcccgatgatgccgtccatgtcggccggcgcggcgggcgccgaggcccggtcgatactggggctcgcgctgcccatgatcttgacagggctgctgctttacctccggtcaatgatttcgatgcttttcctcggccgcctaggtggtctggcgctcgctggcgggtccctcgccatcggcttcgctaacataacaggatattcagtgctgtctggcctcgccatgggtatggagcccatctgcgggcaagccttcggcgcgggccattacgatctcctcggcgtcaccatgcagcgcaccgtgctcctgctcgtcgcggcctccgtccccatcgccgggctgtgggtgcacatgcggcctctgctcctgctctgcggtcaggacgccgccatcgcggcggtcgccgagacctacattcttgcttctcttccggacctcctcctgcaggcgttcctccaccccgtacgcatctacctccggacgcagtccataaaccttccgctcaccgtgtgcgcggcgctcgccattgctctccaccttccgatcaactacgtggccgtctctgtcctcgggctcggcatcaaaggggtggcattggcctctgttctggccaatctaaacctcgtcctcttcctctttggctacatatggttcaagggcgtgcacaagcgcaccggcggcttcgcgctctcagcggattgcttacgcggctggggcgagctcgtcagcctcgccctgccgagctgcatcagcgtctgcctcgagtggtggtggtacgagatcatgatcctcctgtgcgggctgctcgcgaacccgcaggccaccgtggcgtccatgggcatcctgatccagaccacgtcgctcatctacatcttcccttcctcgctcggcttcggcgtctccacccgcgtcagcaacgagctcggcgcgaaccggcccgagcgcgcctgccgagccgcgacggtgggcctcatgctcgggttcgcgttcggcggcgtggcgtccgcgttcgcgtgccacgtgcgcggcgcgtgggcgaccatgttcaccgccgacccggcgatcgtcgcgctcaccgcgtccgtgctgccgatcctgggcgcctgcgagctcggcaactgcccccagacgaccgggtgcggcgtgctccgcggcagcgcgcggcccaaggacgccgcaagcatcaacctccggtcgttctacctcgtcggcacaccggtggcgctcatcctcgcgttctggtaccactacgacttcaggggactctggctcggcctcctcgcggcgcaggcgacctgcgtggtgcgcatgctcctcgtgatcggggagacggactggaccgcggaggccaagcgcgcgcagcagctcaccggagcggcggacatcaaggattgcggcggcaaaggcgatcacgtcgcagtgattgagcaaccagatgagcagtgttgacaagctacgggcgttcaacattgccgtcggctcctcggcttaccttttttttttccatatttttggcgggagagaaaccagaggctaacatatgacaattttgttaccaattggtaatctgtaaagattcttttctgatggttattacagaaggtgaaaaaattcaaaggaaatatcaaagattttttcctctgacaaaaagtcaccctaacagtaacatttcgctaaagctgccatccctggtcaaagtgtgcattggcggcttatgtttgcagataaacgtacagtttgaaatttttgaagtgaaaacaagtagaggctcctctggctcgatcgaacgtatgaactctacagtaatctcaatttccatgaaaatcccgcaaaattcctccataccaaagggggcataaggagcaaaatgggattgatttacctttgatacgtcagacaagctattaaacagaaatctaaccgaggcaagaaaattactattgcatcatctccatagaagacattatgaacgagcttcaattatttggactctggggccataaatttgacatgacaagcaggaatataacattctcataggtaaaaccatacgctcgagtcgaaatcaatcagatttcaataagaaggtttcgtggttctcgataaccaatggagattccattgcatgcctatgtgaataagcaatgatccgactgatatatacactagtactatatttaaacgtcaaagaaccaacgatctgctagtaatggccaacttggaattttcgtacgcttaaactatcagagcaaagcacggccatggaacaagcaaagcaactagtaattttctgaacactggaatgcttcaaacagtggcactgcgatgatccaatcaacgtgtaactgcgtcccgcgagtgaggctcaaacatggcctgtctggatccggagggctatttaatagcccttcggaaacttgttatttataagtattaaacgtagattactgacaaaacacatttcataatccctaggctattttgcgagacgaatctaacgaggtatattaatccataattagcggatgattactgtagcaaatcatggattaatatatctcgttagattcgtctcgcaaaatagcctagaggttatggaatgggttttgtcggtaatctacgtttaatactcctaaataacaagatttcggagggatatttaatgatgacttttacggtacaatatactggcagtatatactgtaagtatttacaaggatataataggaatttgctaaaaaaatgtaattgacattttaataatctattcttaggttcaatctctatctttaatttggcgctgtcgtgtgcatgattcaggtgagggagagatgagccaaggcggtgcaattagtcctctttggcggctggattcaccggcgcctgcttcctgttcatgcggccaatcgccgtctcccaccaccgtctcacgcgatctgtgcacacgaaaatgcatgcattaacttatgtactcttatgttcttgcaaatattctctgcaattttaatctgtagaatctgaccttaagatggcaatggtacagggagcgtccccagtagagctagggttcagtggcactgcaaaatgttaattgttccctataattgattagtactaaatcaccatgcttaattgattttgagcgttgttgcgacgtgcttgtggtggctgccacggcgagcgtcgactgtgtggctgccggcacaactccgccgcctagggtgaacgacgatgggaatggggaatcggatcgagcttgtatgttggaattaacgaaattgccaccacgaaataaaacaaaaagaccagaataccctttttagaattatactacaaatctaattaagtgggtaggtaatcaatctacactattggatcaattatactatcagtatattataccgtaaaatttctctatttaatagcctgaaggatccaaacaaggtcatgaacggaataagatgtatgcggctgctgcagcagcagctagctcctcacacatcccggcgaggagatgagattcctctgctcgctcccggtgttcggtcggagggcgcagctcaacgacgacggcacgaggcccaggtggatccgcctgtgccacgcataattataccggaggtcgtacaatgattccagtggctaactggtgggcgtgacggctatactatctgcaccggcaacggcacggctggcctatgcagtggagtagtattagaaaaaacagaaacggccatttttgcactcactgagccactaggcttctccggactccgagaagatatccactgtttggatgaccccaagagccagtataaaaatgtaaagtactggattactggtaatttatatggcagttgcttacctccaggttaatgcaacgcttaatgaaaattatgctcattatgtcctggtgtaaaacttgtcgtaaaaacgatgtatccgtataagtgtgggttagtagtagtagattttggggttggtatgcgatgagatctagctgtatcagttcgataagatgcgtgtttgcgtggaagcaatcgacacttgttgcttgaatcaacagtctatgttagtctcagtgtgacaaggatatactgtatctcagatgatatcgcagtttgtctactaatacataaatttctcatcttagccatcattacagctgaggctagaaggagctgtgctagcataaacggctggagagctgtagtcattatcatcttttggatgaaagcaattgcgtttaaatatcgacttggtcgcaaagcgaattcattactgtttccatttcttttcgttctctagcggaatcaaggatgtgacggggaaagaaaccaaagtggttaggattataaagtggggatacatcacgaggaaagggtgcagctgactgagtgaagtggacatgtagtagggtaacgagggcgcaagggatttttgttttgtgtagggtatataaacgcacttttttgttgtaaaagaagccttttcaatcatgtaggttcaatattgaagcagcagagatcgctgatttttctttgttggccaactccctgtcaagatccctatcaagacagggatactcggtgttattttcctcaggaaacgattcttgatccaagtttaaggccactctcgagctgaaagcgtccattcatatattcaattagaagtctaggacagttctaactcgccttgtactaaaaaaatgcacataaaccatattgtactatcataatcacatgcataatctcatggccctcaactcaaacatttttagctacacactgcaatttttttataaatagtgtcagaacccacgatataaagacacgattgatttcctctccctgcttccatcactctgtttaaaaacgcattatccttcatttgctacgtttctcactttctcttatttttaaagctaatctcgaccgactttcactagtggaactaacaggccacaatcttgcagatttggtagataatggagatcaatcagttgtcttctttacatgacactagcagtactgtattttttacgtcggtaagatcactaccgtatgattttcttggggaagaaaagaaggaaacaagtcaactggagccctctgcaatcatcatgctgcccttgattgccaagcaaagtgtcacacggtgatcaaacccaatcaatggctctgtaaagcgacagtgatccttcgatgctggacaatcgactttcgtctgaaaactggcagcaactgaaacagagttgcatttcgtccttgaactcgatacccccggccggccctgaagaccacgtacagaagacgacgccaacgcagtctgactctactctgcagtgtcacggtcacgtcctagctgcacgatcttgcatgaacccctccgacactcggttcacgtcacgtaggagtatctaacagttgtggaccggctgagtcgatcaagcaaccaacctgtgggagaggagtacatgcgagatacgcaatgccctcctggttctagacttctagtaaagtggagtgacgtgccagcccaacacgtgccagtctagatcaggaatgaactgcccgttgaaagtacaagcgaccgtccctgtcccggccgtcgcaaacacccgagggtcgtcgagacaattgggggattcttttgtcacacgcaccgcagcgtaggctagttgcggttcgggcgttggtcatgcacgcacgtacgtggctgacccggccgggccgggtgcgagcggggacgacctgggcgcgtgtccagtggtgggggagcagcgccaccggtggggcggcgaaaggtccaccgccccggggtgattcgccgtgtgcgtcgtgacgcatcgccgcccccccagcgcacgcggaccccggcgagacgtgggttgaacgcctagcaatccctggcaatcgcgcacgcgggcgcgggcggcggtggcgagtcgatctggccggcccgggcggtacgtcgccgatggatgggcggccagccgtaaaggccgcgtgcgccgtgccactcgatcggtgagtgagaccgagtcttttaattccagcggcgcaccgccccggctcagtgccccgccgctgctcgagtcgtgtccactagataagagtcaatagaccacggtgccacggtgccacgctgccagtgtgtcgttctactcgggtagtccggcaccagaaggatgatgtgacgtgcggtcgtgcgttcgtggcacatgcactcgcgtgcgtctctcgatcggttttaagctagtggcctggctcgagcgggccgctgcgctggcctaacacttcaacgtcgcagcagcttcacgaaatccatgacatatttgcttacgggacggcaaccacagaaagtctgaactacatatctatatggtgggcgtactcaaacgtatacataaaaaaatgtgactgagcgtatagaaatggatctgaaactgaaacccatcagggctcgtcaacagagtgtgctggctgtactgtttccaaaaaaaaaagtgtgctggctgcaggtagtagcggaagccggaagcaccgttttttgttgatcaaataatgcagttgacatgcggaaaacctacagtagggcaactgggacatgtgtttgcattttctggaagctgacttttggcatgtcaactcaagttgcagttaaatgtccgaatttaagccataatttaaggaccggtttgagatgtttatatcgttatgctttgtcttttcgaaactgcccggccgttgcccgttccctccgtctctgtttcatattataaatcgtttaactttattttagtcaaacttttttaaatttgactaagtttatagaaaaatatagtagtattttgaacgtaaaataaacatattatcaaaatatattcaatgttagatttaatgaaactaatttgatattttagatattgctaaatttttctataaacttgatcaaacttaataaagtttgaatagaaaaaaagtcaaacgacttataatatatatattatttaaacggagggaggagtagtatttgtagctggcagaggaagaactacgaacagaagagatggatggtacctctcttttgtctgatccgttatcctttctgaagatgctcgtcttctaggctggagaacatcaggctccgcgacaatcaggccttggataagctagtaattaatcacgccaatcagggcttcatcctaggactaggaaacaaacaatgtatctgttactgcaagtatagaagtttactcttacatcttaacatgaaaataaatcaggacagcaacccttctcattaatggaatcatggcaggtggcaagttagctattggtggtgggcataattagtttagtcaagtagattacaaatgactcttatgctaataatttctttattggagattgatcaagtatcagaagtcatctagccagattaaaaccacagaatctttcacatcaatattgtaggagcagttttataccaaaccaaagcggataagacagattctctaggctttagtaagtaatatacaattaatcaaatttgcagtttctggctatgtgtattccatgatgtacatttacctccaaatgcatgtccagagcatatacactagcagtacaagagaaccaaatttacacacataaacggatggagtggccgaaagacaataaatctttaacaagaactgttcgattaactcctgaaatacatggcggaaaggatggaggaaataatgcaacgaagtcagcagactttaacagaccatcagtgcaagccaatcacattaaatcaagtcaaaacaccagaaacatagcacaaacactgaaaaggtatacagtgaaaatgcttcattcgccttttacacggacgtgtagtagatttcaactgcttgatggatacaaaggcggaatactatcaaacatccttcagccaagattgaacatgtaatacatgagcattttaccatttatacataaatatatattttctgaacataggttatgttaagtagcttgataaaaggagtaagcacttacagaacatagaagtacgaccagaaaaaaaaacaacctattttaaaaatatatagtacttcagcgaaatagaataatttcaataatgagtcccctcagaaagaaaagaccaggatagaaatctggtgagcacaaagaactgcaaatgtggggtataggagtacatgataaaaaaataaaaagaataatttagtggtaccatttgcaaatataattttcatcatgagctgtttaagtaacaactggatttatctttttttttcctcagcaatgagcctgttgactatagatgacattataagtaactacatactatatatgagttttatattcattgtcaatgcattaagaaaccacaacatgcaatacacaaatgacagctacagtcaactacatttatattgcaaaaattgaaaaatgtcaaacataaaaaggaagggattgggaggattcaagttgacctataattcttttgagttgttcaagttgaccacttttagggaatgcagctttagccaatggtattcaggtcaaactgatgcatcagcttcttacttaagttatcagtacattgtatccttattgaagacaagcaggagagttcaatcgagaaataagttgatcaacatctgagcagcactaagggtcagatgactgatagaataatataatggacaggatattttaaggcaaaatactataatcagtctggggtgatccaatgttcaaatatctgtgttggtctcaaaactgcaacacaagaccaggccgtcggggacaagagtacaaacaatgtacaatgtcctattttctgaacttcttactgacaaagggaacaaaggaagggcctttatcaattccaaattaaacgtcttgcatttatccgtggtcactttcattcagatgcaatttcagccattactatccctgaaaacagatcttctgtcaagatgctcaagaagatgctactgttttctaaagatcaaaggtactatcaaaagtacatataattggtggtggtctgtgattacagaccgtcacaggagaacggcctggcccaacatcaaatttggcccaaatatcacgtgccaaccaaaatcaacagcataataggttttccgagtgacggtgagatgcatcacacacattccacagcatcagtaggattatacacccatcatttgcagtgcacactacagcagatgcattccacagaaataaggtagattcattgttaattgtgccgtaaaccttgcagttgattgataggagttggatcaataggaaccaatgcaacaaaattagctacatcaacttcaattaaaagtcagggacgtttgtcatgttttacgaaaacttaaggaacaaattagcctgaacagaaaacttatcatttaaagcattttatttgaatctattctgagatcgaaaaacatgtagtataacagtatgacagaagtcggccaaaaatctcttgtatacagattacagagtattgcattctacggtactaattgcatccactattcgataaagaagttttaaaagcacgatctttcctacggaagaggtaacaccagtctaaaaatcaaccgaacattcagcaagcaagcaagatatcgcaatcaggagttcaggactaagaccagatcagattgctcgtgcaaagaggcatttcaacaagcacctgccgtgcgtgcccaatcagataagaaccagcaggtgccaggtagagaagctgaccttactatctcgccgttggccaaaagcaaatctgccctttgaagcaaccggctgacggagggaggcctgccgcctgcctgatcgctgatcggtgttggattttaggcggagtgacaagtacggagtatataacctgacctaattcgtgtacatgttcatctgcggtgcctgcctctctgggtttgtaagctgcgggcctgcggctgtcctatgggccgtatgctgatcgtccgatatactcaaatgggccgtcgcctcgtagtaggagccccggatgatgggccgagctcgaacgtgtcaataaaacgagactactgttcatacgcaaaatgagtacgcagtctcaagtctcaacgagttgtataccgggagtccgagcctgaaaaatacaagttgttttcaggccactatcaagaacgttccgtgcggtacgatgccgtgcattaggtaaggtttgcgcggtgaagaaggccgacatgccatctcactgacgtgaacgcctcctcgcccgcgggttgttcacgaacacgagtactagtgcgtagtactagccgtgtaccacccacctcggcactcgcaggctcgcagcgcatggtaaccatcttttatttgtgttcccgaagaaaggtggtaagtagaagtaccttgttttttttaatttcaagatatgtaagtacacgagaaagtccgtatcattcacgtagcatgcagaccacgcagcatcgtttgatcaggcgtggcgtggcgactgccaaatcttggactgttccgcggcgcgcacctgctcccttcccacgctcccacgccgccgcggggggccccgcgcgctctcctcccctccactattcaaatccgcatctactagccacggccgccgacccagcccttcccgagtgacagctggacccccggtgcgggtgcccacacgtcatggagagggcgaggcagacggcatggagtgccgagtgcgaggtggaggcggaggagcagatctgccgactgccgaggcggggtagtagtagtagggcagctagtactagctactagacgcaaggcaggcatcacgcaagtcacggggagatacttctcattctcgcgacgactcgtgctgactgcttcgtcaccaactcaacggattccatttccgccgcccccgcgccgcatcattcgttgccagcgccccacgcaaatcccaaatcccaaaccccgcggcgatggccaccgtcgcccagcccgaccccagcagcagcagccgccgcaccgccgctcttatacgccgcagcggcagcgtcctgctcgagcaaccgtattattagccacggccccgcacgcccgcttgatccgcctgctgcgcgcgcgcgagttttttttttttccttttttcctgttggtgttgcgcggtgggcgagaggtgttggggggaagatgctggggtcggggctgaatctggtgaccacggtgatcggcttcgggatgagtgccaccttcatcgtcttcgtctgcgcgcgcctcatctgcggccgcgccgcgcgggccgacgccgaggccgacgccgccgagggcagggtcgcggccgcgcgggccatggcggctggccccgcgccgttcgacttcgacgtcgagttccgggccacggatctcgaccgcacggtaagatttctgtgctctactccggtaataacatcatctagcgtttagctggttggcgtgggatggctctgtgcgcattgctgcgtggtgaattgttgatgctgtgccgcttgaattgctttttaacatgactccataagcgatgggtccaatagttcgcaatttctacgggtatggcaaccagttcacggaaatgacaaatcgccacgcctcacactgatttaatttgttccagcagtggaaaatctaaaaaaaaaaacgaatggttcctccatttacttccaattatctggatacaaattagacaacaattcaaggcttcaagcttgtttatgaatggctccttcatttgatttcagttataaccagggtttaatctttcggtttggacgtttctatcagagggtgctgatatactgaaattgcagaaatttcgttctgaaattttgaagacattttagtcaaagttgaataaaataattccaaattcacaaaaaaaaattcggccaaaataatatcattgggggggggggtccgatatgatcgaaatttcgttccggaattttgaaccctggatatacctggatacaaattagacaacaattcaatgcttcaaacttgtttagttgtgcatgacgtgcaaattctgttatatagcaattgagcaataaatgcacatcacactttaactcaggattgatgcatactatttgcaatgcaagctattctttctaacagaaagatagatgggcattgcctttttaaaacctaactaagcttcaaatgtggaaaaaatgcttgctccaaatgcgtctgaaaaatcctagtaacaatgaggtgataaaatggagaaggaaattatgtgtctgaattgagcaaggagtgataacttgggaaccaaaagtactactaatcctactaataaaaactattaacttgagtaaacatcgtaataaaaaagattttgtagttatattaaaaagagagagagaagacatggtcttgttccaaaataaatgcagttcgtgttggccatatagttatgccaaagatttcctttgctaatcaaaccagccatagaaatttcaagttacttaacataatgtaaacttgttttttcttctgatgtatgtctaatgcttggtcacaatataatcgagttgtcatagtgtattttttctcttggttgttgtgagagtgtctgaattactctcatcaccaatttatgtcaatatcacattattttctataactcaatagaagattagacatctgcgctgtctgtttcaactgtgaatatgacatgataggttaatatgtaatatatcacttcacaaacatgcaagttcaaattcgacttctacaagttataacaaaaagtcaaaaaataacaaatttgactgtgaatatacgtatactagttagagtttgatttgttatttttgttacaacttgtagaagtcgaatttgaacttgcatgtttgtgaagtgatatattacatattaacctatcttgtgaatttttttggaattttttcataatcatttaggtggcatgcaagaaacgggtggacgtccacccaagagattagaatccatcctccatatataaagcatcttttatattgcttacggacaacctagaggcctaggaccagattcttgccagttttgtgcccattgatcacctttacagacatgctaacttccacttgttcatgacaataatattttcagtgagtagccttttgggaagataaacttctaatctattgagagttttgaattcttcatgcaaactatcgtagtattgtatatatattgataatataacaatattactgaaaagttacacaacaattaccagattccaaattccaaatgtaatggcacactaaggtgctcctgttgtatcttttgatgggctcccttttgtccttatttacttgttgcatcattcctaattagaaaatgatgcttgaactgctaaaatcagatatttgtaatactaaatggaaaaccactgtgctaattaggtatgtgcttgtgttcggaaattaacttggtcattcctttttttttcaatagattgagcatacccgtagtggattggaaccttttgttgttgctgcaattcctacaatgaagtacagctacgaggccttccaatcaaaagatgatgcccagtaagtgtactgtatactgtagagctacttacgtgcttccatcttttggtctcctgtctatcatgtttgcctgttctggattggcagcaaacttcatgaggtagtatctgcaactgtccagttacctgcatcaaactttctttgctctgctggaatgcctgtacagtttttcttttcgacaattgtcagtgaaattcactgaaaagaatattcaagaagtttgttagtgtgcataatatgttaatattagatgaacaattgcaaacaactccattccaaaaatgatgatccgatgctgatagcctgaaaaatatttcatatttaatattggtgatctcatgtgttgtgaagcatgtggtacagctggctaagaaactgaaatatgttggaacaactcaccagccagactagctctctagttgtgatttacaagctatatagcatactagtgcttttgggaacaagaattgcatgagctatctgttgttattcttttatcccatttttgaatggaggaaaggaaaacaagcagacctgataattgaacattgacccatgcttgctaatctaacatgactattgaagatagtgagcaatcaatcaaataaaactactggtagcctaaaaaaaacaccggtgaaattgatacagataatcatcagagtttttgtgtgtatgtgtgcttgtgtttcatgatgtatcggatatgcataacatgaattatgtgtggaaaagagggcagttgaatagaattatatttttgattaaaaacggtctctagcacttatttggtgaacagaatagcactggacctgcatatgcttcgctgtcttttcttttttatcttggatctgtgtcttcatggcaagaagttactttcttgtccaacagatatcatttgtaaccgagtcttccctgccaaaaaatggaataatcaagagaaaataccattttgtgttaggatttatattactgggctgactatcatgtcaaaaataatattactggttgatgattatggttccttatttgtgctgcgacatgctcggagaaagttaccatcttgcagaaataatgttataagctatttgaccttttttttttgtttaacaggtgctccatatgtttaggtgaatacaatgagaaagagattctgcgcatcatgcccaaatgccgtcataattttcatctttcctgtatagatgtatggttacaaaagcaaactacttgtccgatatgccggatctcattgaaggacctacccagtggaaaacctgccgagtcccctgtccgtagtctccctcaactattcagccaccctgaaagctcagtgagtcgatcacctcattggatacttcctatccatcgtgatcgtactggaggtagagaaagcagcccggcttcacaagaaacagtagaggtggtcattgaaatccaacaagaaatgcactgaggacatggatgtatagaggcgagatatcgatagaagttgatgaaactattttgtttttcggttgagcaacaaagatatcttctattgcagaaacgccgtgcgttcttccagcagcagggcagcacgtacacggctttggcacagaattgcaaggaatttgtttacgacaggactggattttaggcattctttgtacatttgagggtgtagattagcgggttgccttttgcccctctgttcattttttatgtgtccttgatgtatagtgtaaaaggaagcattaacaatactgatcagattcggggccgcgaaaatatttgtagcagcgccgttgttcagatatcatcagtttatcactgctatcttcagcttgaacagggcgtcttaggccgagtttagtttcaaacaagtttttcaaacctccaattttttcatcacatcaaaactttcctacacacataaacttttctgttacatattttcaatttcaaccaaacttttaattttgacgtgaactaaacatacccttaaggactttacgatccattttctagtttcaatgcgttacaggataaatcacatcctgtgataattcactcccctcctttcccccactccgaacgagagcattcatgggtgttacttctgcatcaacagctgtgacaacgctaagttttcaacgactcgaggagggtgcccctgtttctgcactgtgaacgactgtaaaggacacatcgtcgtccacgaccggttgtttcgacacctcattgtcgcagctctacagtgtcagctcagcctggcaatggttcaacgctcggcgtagtgtagtactggtaagtagtaataaccgtgttgttacacgcaagaaagggagaaaaaaaaaagaggaaagctgcagctgtcagggtaaggctgcgagctgggactagttaactactgtggcgacgctgcccggccgcccagggtggcggcggacgagcgcgtcagatgcgggcgtgcggcttgtagccgtcgcgaggcagctggtgcctggtagccgcggagcggagggagctatccgccggcgcccaaagtcgcgcagggtccacgcggctttgcttatggcgtgccgagaatccaccggtttttgacatttgccaagccaccgccttttgtagatgtgtgtattttgagcccgatattttgagccgacttacactgcagcagggcacgtttgtgttcttgttttgagccgacctatttaatcagggagccccagtgtgcgaactgtggatcaccgtgaccaaatttacgactccatctgataccaccagtgtgacgacgggtcggagtcgcgagggagaggccctcctggcgccccaacgacgtctaggcctggatgggctggcccagggtgcactgtgcttgcgtcgtgtacatggaacggataagagaaggtgacccagcgtgagaggtgctggcccggacaaagcttttttatatgcccgtggattcgttcgtgctctaacttttcaggtttcggactaggggaaagggatttttatttttttaataatgaaacgaatcccatcctttgtttcaagaagctacactaacttgttacgaacattattcggaaagcgacttaaaattctaaatatgagaaagaaaaacactaataattccaaatatgagaaaaatgatttttattagctttcattgaggttgttgtttttctcgattacacaaaagacacgtatacaccgcaacacaaattatgcatatacgcatgcatgagtccttcccaaagaagacgacaataattattcaaagaaaaaaaaagaagacgataataggtggtaaactggtcacctactaagatcgcatcacacatacatccactagtgcacattggaggacatagacttgtggtaaaatacattgagtttattgtagtcctatctaataatctaaagctggttcttttgctagctttcaattggtccacgtggcgcctcttactattgaagaaaaatcataaatttatactagagaaaaaatacctaacaatcatatgtgagggaaaatctagagaaaaatatcactagggattccacagccttccaaaattattttctctttccaatcacacgaacttatactcctttacattctataaatataccacgtctactctgtactactattacatatggatttcagaggaatccaaaactatctctgttttcaatcacacgaacttgtactcctttatcttctataaatataccacgcctactcggtactcctcctataactctagaattatatagtaaagtcaaaattattaagcaaaaaaataaatctaaaacaatgaatttacgttaattttccttcgttagatataccacgcatactcgatactagactcctataactctagaatatacagtaaaaccaaaattaatatgaaaaatatccaaaacattaaaaaagattaaaaatttaatagtttgttcattaaatctttagttatgacataagatgcatctgtattgacatcatgcacccattttacagcacagacaattatcaacctgtgtaccagaaaataaaacatttaaaaaatcattctaaataaaatgagattttttttttcgagtgaaaaatatggatatatgatgatatataatatattcacgaaataaaattgcaatcctaaaaggaaaaaaatgcctgaaattccataaggtcggggttacatataaggttggtaacatagctaaaaattgaaagagaaaactaaatacgacgtaagatccggtttttctagactaaacgttgtacattccattccgtaacagaaaataaatcccacgatctggtttttctagatggccataatcagctcgccgcatgtggctcgcgaatgcttaacaaactcgtatataggaaatacgcggtcgacgatagcgttgaggaagatgaacacgctattccatgaagggttgaacaggaaatacgcggtcgacgatagcgttgaggaagatgaacatgctattccatgaagggttgagcagctacttcacgcatgagtattatctgaacttaattaccttgcactcaaaacctaattccaacttccttgcgtcatcagaatgcccttgtttattaatgtagacggaataagacgagattgataaggataatgtcggaactgacgacgacacacctaaattttatgacaagtcgggtgtctgaattttagcttttttcagatgatggttatatatatttttgtactaaaactgtagattgcattcattgcaatttctgtaaccgcaatctacaattttttttggtaccgtgactaaaaaaacagttatattaaatcataaatccaataaaatattatttgtgttggcacgaaaacaattaacagtttacattttttatagaaaaatacatgacaaaaaaaataatatgctatgacacaaagaaaataataaatcataaaaataacaatttacttgttttagttaaaaataaaaccctgcgtacccacgtgtttacaatattcgtggacagtaagatttcaatcatgatctacacataattcaccataatagcttttattgcttccacataattcaccataacagcttttattgcttcccttattgaggttttgctagatttttgtatttcatttgtctccaactccttcaattcaagagcgcactaattattcggtaagagcatctctagtagtaacccctactctagagtccctaaagtttaaatgggggctgcccccaatgctttaagaccctaaatatgcctttatgtctagcagtagtctccatatcttagcccctatttcttttttctcttttattttagtatagaatttatatttatatctagtttaacacacaataattcaaacatagataactctagcgcgtagaattcaaccatattgaaatttgcaatttcaaacaccacgattcaaatttgaattcaaaattttcaaacatgaaaatgatatatcctacaagcaaatattgaacataacccatacatgatagaaaatgcaacgaaacaaactaccgagcaccatgaagcgcccacaaatgttccacaagatcatctcgaagttgctcatgtaccttatacacgcaacaactatggttgctgcgggtatttttcttatagcttgacttcttcctcttttcatatccctacctttgataatgagtttcatttctttaataggtacactaacacttttcttaggagccactttagctcttgctcagagagatattaaaagaagcttagcctattctacaatgtctcaattgggttatatgatgttagctctaggtataggttcttatcaagcagctttattccatttgatcactcatgcttattcgaaagctttattattcttgggatccggatctgttattcattcaatggaacctcttgttggatattcaccagataaaagtcagaatatggttcttatgggtggtttaagaaaatacattccaattacaagaacttgttttttatggggtaccctttctctttgtggtattccacctcttgcttgcttctggtccaaagatgaaatccttagtggtcttcaatttctttatgtatctttagaaacttctctaacataggtttattacgccgttggtattcctcctttctcaacacctcactgtcctcctgatcatagtcgtagtctacatcttcatctcgctcattgtcaatgatcatgttgtgcatgattacacaagctgtcattatgtaccatagggtctctgtatcccaaaatctagcaggacccctcaccattgcaaagcaggcttgtagaacaccaaatgctctttcaacatcctttctcactccttcttgaacttttgcataatgtattctcttgttaccttgtggattggaaatggtcttcacaaaagtggcccaagaagggtatacgccatcagcaagatagtaacccatagtgtatttctttccattcaccataaactccagctcagaagctgtccctgatgtaagcctttgaaagagtggtgatctctgtagtacattgatataattaagagaacctggtaatccaaagaaggaatgccaaatccataaatctttagatgcaacagattcaagaatcatggttggcccatccacatgccctgagtattgtcctttccagcctgttgggcaattcttccacctccaatgcatacagtcaatacaacctagcatccctgggaacccccttggagtgtttatagccatcaaccttgcagtgtcctcagcagttggtgccctcaagtattgatcagcaaacacatctaccacagccttgacaaagtgcttgaaagcttctatcatggtgctctctgaaattctcacgacttcatcaagactatcggctagaatatcatatgcaagcatgcaaattgcaccatacaccttctacaatgcagtagcaccgagaagacccactgcattcggtctctgcctgaagtagtcatcataagcctccacactagccacgatgcgcaagaagagctcctttgacattctgaacctcctcctaaataattttgcattatatacaggaggatctgcaaaataatcagccactatgcgcaaattgccagcaaacctgtccctataaattatctcacgacctgggaccgaaccacgacgctttcttttggtcctcttatgttctatgtccgtaagaagagcagctgcaatgtaatagtcatcatcgtcagacaactcctcttgatcccaccattcggtaatgagatcgtcgtcgtcgtcgtcgtcaccgtcgtagaagttcatgtaaaaaacactgccatcacaagatcataaaattaataagaaaatttagagcatatgcacacgtatccaactacacacatatacagtatgcaacattcaatctataaaaagcagtgcatatatatatatatatatatatatatatatatatatatatatatatatgtggttataatcgatccattgcaacaattgtacagtgctacaaaatgcagtgctactataagtacagtgatatatactagttgagaatttagattgtcctggccgacagtccactacaattcttcaaaaaaatattaaaaacaaatcagtctccaccagaaccatctatcaccacgtccacaggtagtcaagaacgagtttattcagaaaaattgactggtactctactactcatatctcctctactactcaaccaccacaccacatgaccaacttcaagttttttccagaaaaatcaatggggcagcggcggtgtacaggctcccgccagtgaaatctgaaaatacgatcgggcagaggccagcgtgggggcagacaccgtgcaagtgggtgatgtgcgcgtcggcagtctcagagggcacgcgacggccggcgtatggccaggcggatggcgggaggtcggtgaccgcgcgtgcgcatggaccgccgccgccggccttgtggacgacgggcaaacaaatgtatggaaaagtcttaccttttgggacaggcttggcagagatgctgggagttcgtcggtggtcgccggagaagatccctcgtcgcagccacgcgggaataacacgaaaaagcgcgaagcaaaattgttatccgcgccaaaaaaagaacgatgggggccgtgctcggagcccccaggactgaggccttggggggaggatttgagggccttctcattttgggggctgtagtagggaccctgctggatctagttttttttatctttaactctcaaaatttgaataggggctggatttaagatccctgatggagatactctaatggcattttcagtgctctacgttacattcgacgtactcgtggtgataaataacatgatacatgtttttttttcatcacaataaattaaaaagagtagataaatgtaagaagctgtctaattgcgcgtaacataaccacgtcacacatacaaattatacttacgaagagacaatcaaaatagtgtaggatcgatcaaggcgattgtacatcacaaaatcatatatacaatttaataatacgagaagatagagtgggtgaaaaaaatcattgtttagccccattatgtagaaatgccacctgtgtatatagttgttattgttaggtgtggattcctacatatttttaagtgtttaattaaccccgtttgcatcctacatgcaaatgggccaatttgacactgtgcagcaaccctactactacaggattttagatctgcttatagctggggttttattattatatattaaaatgttgttccagagcaattttccacgtacctagcaaactagctaatatgaaatgcgctgaaggattctcgagaaaaagggtaattcgcagtaggaatcaacggtaagacatgtggaatgctaattaacaacaaacaccatggaaaatttgaaagaaattaagaaagttctatgtgcacatatatcttctttttgtaattataataactaatagatttttcaatgaaattttgcatatatttgtgaaatattatttacattgatatacaaatcctgggcagtattgctcaggcaaaatttgttacaagacactcaaagtttatagtatttgatattagacacctaaagaacgtgtatcttctcgtggatactgcaaaaaaatggtaattagcagctggacatccgcctcattattttattattttcggtggaaacggagagagaaacatttgttaaagacaagtttgcccatggacccacttgtcaatccctcttatctctttctctgttcatcttcttcctcctgtggcttcggatggggcagtggcgaagtgggcgccgccactgcagcagcagctagagcatggggcggcgcgctgccgctaggagtcctccccggggctccgcttcggatgaggcagcaacgaagtgggcgctgccgccgttggccaaatcctggcgcggtacgcgtgccccgtccgccatttcatccactggtggatcgacatggatggctcattttttcattttttcccccttttgagatcccctcttctgtctttcctctccgtccttgacctcgcaaagagcagttgtgcgagcgaaatcaggggcatacagcatacctgctccccttggggcccttcctactctgctcgcactcgccaaggggtagcgaatcagcgccgttttccggctcgcacacggcttggcttggcattgctgctgctgcaggccaacggggacatctgctacatggggctagcatgtacctggatgccatcgtgctgcccttgccagatggagccgttggtctgctgtggcatgtcagtgtgagaggaaaagaaagaaagaagaagagaagcaggaagaagaacagtttccaggggtattttggtactttcaacgctctttctctctctccgttttcaccgaaaataataaaataatgaggcgggtgtccaacagctaattaccacatttttacagtgttcatgagaagatacacgttttttgggtgtctcacagcaaatgccacaaactttgagcgtcctgtagcaaattttgccaattgcttatgtgtaaacacatctatatttgtatatatatataccatatagctatattgatcaatcttcagcataataatttgaatcacacatctccatgttttaatgatgtatatcgatctttctcttttatccaactaacgtggtaactcctagatattttgctacgttctaataatataacatatactcattctctcctagtcctagtaattaagggtattttagtttcaacactatcttaaggactacttcctccatttcacaatgtaagtcattctaacatttcccacattcatatttcccacattcatattaatgttaatgaatcgagacatatatgaatgtgggaaatatgaatgtggaaaatgctagaatgacttacatcgtgaaacggagggggtatatctaattttgactgttaattatgctaccaagcctcgatctccctctgttttcacataatctcccatgactaaaacaaaagatgaaggaaaaagtgcaccggaggtccctgtacttgtcatcgagatacgaaaacgtcctcgaaccgcaaaaccagatatacggggtcccttagctatacaaaaccggtcacccgaggttcttcggtggttttgaccctggttttggtctacgtggcggctgagccagcgtgggccccacatgtcagcatgccacatcatcactccttctctctctttcccctcctctccctttctcctctctctctctcttcacttttctcctgcaagccggccggcggatggggaggagatcgtcggtgcgacgagttggcggcggcagctgcgacacgggagcaggccaccgcgccgggtcagattcttgcactggccaaggctgcggcggcgggggacgtggagagtaggacggcacggttcgaggagatgctgcacgtgccattagaggagcgggaccgcgtctagcggcgtcgcagttcgaggagatactggtcgccacgcgtgcccgtgctcaaggacccgccgcctccgcctccgacaggccgacgctgacgccggcctccccgcgcctccccaccacggcgccggccacccgcaagcgctgtgctcaaggacccgccgcgacgaggtcacatcctcctctctcccctccctcttcctccagatccgctcgacgctgttgacgagcgtgacaggcggcggatcgggcaacatctcggcgagctcgtcacgggtggcaacacgcgccaagggtccatgtcggcctcatcggtgacgcgcgcgactgattcgtcgaggtaggccaccccattctagacccgtgcctctgtcggcggcggcgacgaggttggggaaatgacgagtcttcatctttgccgcctccaccgagatctccggcgtctctgtgcgcgagcatggtgagggctaagaccggcgacggccaacctcctactcccgacggcggcggcggcaccttttgcacgcaccatgactggcgagtgggcctagacatttgcaacgtcagcgaaaaaaaatgtggagagaagagaggaagagagatggtgttgacgtggcatgttgacatgtggggcccacgtgggtcccatgctgactcaaccgccacatagaccaaaaccagggtcaaaaccaccgaaggacctcgggtgaccggttttttatagttaagggaccccttatatctggttttgcagttcaatgatgttttcgtatctcggtgacaagttcagggacttccggtgcactttttccaaagatgaatcccaaggtaaactaatggttcttaattttttgtattgtaacgaagatttgaaccactttttccgtatggtgggtcctattaacctggaatgacagtgatttcaaggaatatttgaatcgccttttctttgatcaagtgacaggtcttgttaatctatggtgaaagcgaagttaaggaagagtttgagcaccttttcttgatcaagagatgatataataatgataataatatatataggactatactaatttagggtacggtgtgatgtgccatatagatttcaagcaacgatttagcaccttttgtctatgcttcgatcgatctgtcgcgaataaacaccgacttaattttttacattttactaacgctctaatatatagtgctaaattacctgaaaatcaaagactcgatcgaactgctatcttgcaactactagcaacatgtgtaccccctagctttggtagtactcctatattaataagtagattgtgggcataacacacgcatgtctgtcgctgttggtgacgtgctaattgtcagatactgtactagctacacggatattgatacgccaacgcaccgtagtaccgtacgtcacgtggtcaaaaccacacccaacgcatacaacgtagtacaatacgctgcgtggatgcagcgcgcgaccgagcaataggccgggacgcgtcgtgatctcgtgtgcgcctgtgtggccattcgaattggaagtcgtcgaggaaggcatctgtggcaggtatgggcgaggagccaaagaccgtgacaaatgcaccgacctgcatgcgcatgccgatgatacgcgcgcgcgtgcggcggcggcgctggcggcggagtacgtgatctcggctgatcgctcgggttaattgggtggccggcgcggcgttccttcgtaccaaagcaaatcgattcccaccgcaactttggctcgggcgctgcacatacagcatgttacggggtacgtggctcgctcaagtatatattacgtgtacgtgtatttgcggataatgtcgcatgcacctggttagctagctagttgtatttttacacgtacgtgtaatttgtaaatgtagttcatagtatatattctatctctgctttttcttcttagtcaccattgactatggcacgtagtaacgtaattaattaacttcttttatgtttcacagggagatatatacttatactttctagtgtaaaatttaataactttaagtactaagcacctcgaaacactgatggagaaaccggttgggaactccctttagtcttggttttccaaccgggagtaaggatccgggactaaagatggtggacatctttagtcccggttggtaaggagatctttagtcccggttgatgttaccaaccgggactaaagagacaatagcggtagtatcagatggtccctttttctttttttctttttttcctttttattttctcccgaatcaagtaggcaaatccccaaatcaatccccaaatcaaactaacatcccaaattcacatcaccaaattcatatcacaaatcataaagttacttatacacacaaattaaatacatcacaatatcctaagaaattactcaaatatatcacagatccaaacaatgaatcacaaatttgtaacttctcagtcaaatacgtctcagtgaatcatcacaatttttttttaaaaaaagaatgccgctgctgccgccggtcgccacgaccgccgggcgcggccccgtcgcctgccgccaggcgcggcccccccggccttcgccccgccacccgccgccctccgccgggcgccgccccgccgcccgccacagctgccgccgccggccggcccgccagatgggaaggggaggaggggggaggaggaagggaaggagttggagaagaggggatgaggaagagagttagagaggatagatctgaggagagggggtgagattcgatctgtctaagttgtaactgtggaggagaggataagtgatagggattatatactatgtgttttattttagtcccggtttttagtaccaaccgtgactaaagtggtgatatttagtcccagttattaacactgaccaggactaaagattctcggcccccaatttttataaccgggactaaaaacaatctttagtcctggttctttttggatccgggactattgtggattttgccggaccgaccaaagatggtttctccaccagtgaaatactttctcaagaaccaaaaactatccctatctaagtcaccaaaatgtcaaggcatataaacaaaagaattttccagcagatggaaccctaccaagaataaagatgagggaaggcttttgaccctagctaggatggagcacatatctaacctgacactcctaagtataatattgtactattatgtgtataaacttttttttattaataaattcattagcacaatattgacaggtgcgagatccagtcacaacgacgacggtgggagctagatccggtcacagcgacgatggtgcccgttgctcccctcctgagagctctcaaggcggctggatccggcggtccacttcacgtccagatctagtggccgagcacaaagaggcgaaggaggatcacgacatgaggatgaggtgaggagcacaatgtgacaacaacaatgacacaacctcctcctcatttctctcgagctcgaagatatcgttgttgtcttcccttatctcttccctctgctgacgacgaggaggcggctaggagcagcgccaccgccgccgatgaggaggcggttgggagcggctccatccccttcgcagcttaatgccgctgtcagccctgcgacgaccaaatccacgccgctgccactattggggagctagggtttcgatttttttccggttttttatttttgtgtacaggtgcgccacccgcatacaaaaatagtgacttttgtagacacctgggtgcatgcggaccgtccagccacctacgaaaatcggatttgaccgtatggaaaaatgtttttttactagtgtggtccacttcatttaacataactcaacctaggtcaaccgtgtttgcaagctcaagggtgaaaatgtcacttacatttatacgctgtaagcctacaacattttcgtatccgctaggtagtctacccaaaaaggggtagaaatttagtgcacgtgtgtttccatcactccttttttccctaaaagctttcatctcaaagctttcgtatggatatttatccaaaaaaaaaatctggaaattttcattagaaagatcgattttcatcatagaactcttatacgaaaagtttcctattaattcgtgactgcctgaaatgtacagaatgtacaaaatatgtacaggttgatccgtataggtacaattatcaaaatgaccagtggcaatatacttgatcagtagcatagttttcaaaaagaaaaaaaaaagaccagtggcatagcttcgtagtatgaatctgatgactctcgttgatcgcctaacggaacttaaaccatatcattaaggtttatatttgggatttgggcaccaaccccaggtgcatgcatgtgctgttcattccaacagaagcaggagaaactttgtcaaagccccggtctgaaattaacaccgcgccgatatcgcgaagcgtatagggagatactagttctgatgatcaactgcgcgcggccacgcagaggttcggcgaagcagccagatacatgacgcagaaagcgaagaaaagctatggccgatgagaggcccacttggcaggccaccggaaatccaccaatcactgggcccggccgtacgtatctcttgttctcctcgcgtcagcgaccaacgggaattaccaccaatcacacactcgctaattgtgtaggaggctaatcagaatttagaacccacgaaattaaaaactgaactactgggggccatgagtactagtctggcaatcgaggcggaagacagcgacggcgccacccccgcgtttgctcccgcgaagataagacgaagaagcagaggattcagccaggctaattaagcaaaccggtagtaagtggtttttatgctgctatagcttagcttaggtaggtggcgccacttagcttcaccacttgtgcggctttgctccccaggcaccagctcatcgcaagccaagcatacgcatccatccatccatctccccgctcaaattacgcgtctcctcatccccggccgcgcgcctcctcgtctgcagctaagctagctagcacggccctctgctcgtccacctcgagagatcttttcaccatggcggacctcacgcttctcgcccgcttcttcaccgccccttatatagcccccatccccctcgtgcattccatgacacctactagtttagccatctgctggtctcgatctcctcttcccttccctatctatactctctctatctccctcttgttgcataatcatatcgacttcttgcaagctaggttcgattgtgttgagacgcatactagcttaattagcagctggccggcagatattctcttggtacagcagccatagctaggggggagtaggtgcactgtagcttaatttggcggatataggtcatcccaaggtgtatatatgtcgatgggtgtgccctaatggtacatggctgacctgaccgagcatccgtcgccgactgctcctcctcaagtgcaaacagctggcctgccggcggcggcttctccgggtcctgcctcgcctcattcaccgtcggagcaaggggacaagacggcgcccggggcagccacggcgtcgacgatgacgacggcgagctcgggcgagccgtcgccacggtcctcggggaagcacgccttctaccggggcatccggtgcaggagcggcaaatgggtctcggagatccgcgagccgcgcaaggcgcgccgcatatggctcgggacgtacccgaccgccgagatggccgccgcggcctacgacgtggccgcgcgcgcgctccgcggggccgacgcggtgctcaatttcccgggcgccaccgcctcccgccctgtcccggcgtccgcatccccggccgacatacgcgccgcggcggccgcagcagccgcggccgccgcgcaccttgagcggccgcacggccccaccggcactgcctatcctgccaccgccgcagcggagcaccaccagcagcagcagcagcaacagtacggcagtggcagtccggccgccgacgacgtctcaggctacccgccgatggagggagggattggcaatgacgatttcatggacgaagaagccatcttcgagctgcctcagctgctgcgcaacatggcggctggcatgatgatgagcccgccgaggctgagccccaccacctccgacgtgtcgccggagccgtcggaggccggcgagagcctgtggagctaccgtgatccctagcagcttgctccgattgcatccatcgatcgatcgacgaccgatcgccgtgtcttggtgagctgggcggtaattaataaaatctaagtacgtactactatagcatctagctagctagcggcccgaattaatcatatgcatggcaagataaggagagagagaggtagggtacacttaacacacatcgacatggacccaagaggccggtgcgccgcagcgtcctccatctggtaatatatagtatgtgtgttgtgtattactcctatatatgtgctagctatcagtagaccagtacccagtcgtcatgcagttacacatagcttcgattttgtgtgctagctagctagctaagtacctttgcaattttcttttcttttattacttttggcagttcatttttcctttcaattgtgattcggtgtgattaagcaaagtccacttgctgattcacttgaattattgctcgttttagaataagagcatgcaagcacgtgtttttttctaagtgacaagtggatctcatgtcagtgagacttttgcggactatatatatgtacaggggtgccatcactgtaactgtaaaccagataaaatatttagtggtggataagcaaagaggtgcagacatgcatgcatggctacacttaagccttttctcgatgttgtactgtattaccttttgttgtagcttatatataggaatatgcaggttggggaagttggccgttgaacagatccagagcaagcagtttggtgagcattctttaagttatactgtgttattgtttcagacaatatatgtttgccattcttcaatagtaatacgaagatttgatgcccatggaactatgtgagactagaatctatccttaaaaaaaactacgtgagactagagttataaacatggagtagcaaattctcaaacgaaatggctatggggtctattcgattcagctggactgtggttgtacagccacagcgctgcatccctcctagtataaattgtttactgagtctttgtttacgcgaaaaacagtcttgtagatgcagcgctgctgctgtcacagtgagctattctgaacgcactcatgatttaatgggtacgatccatttccaactcaactaatacacagacataactgttgttttcctagatctacatggagagaagctgagcgcaaggattggtgaatgagacgcggtcgaatgctaatcgtacgacatgtatatatatgtatggtaggactcattctcaaatatcaccatgtattaggtagtttgtaaattatcgatattccgttagctagatttattttaattgtctaaaagctagattttcttaaaataatcacatagtgttacatttaagtattttataaatatgtgataggaattatagagttgggttaatcacagttacatatgcttcaggttgcttctcaaatactccctccttcctcttttgattagtttgaaaaatgaactaaccaacatcaaacaaataaaattggagggagtagtaattaatcagggagctttaaatttcttttaaaaggtttagaacacatcttggatagaatgattcccctggtggtgtttggatctagcgacttaactttagtctctttgtttagacactaatttagataattaaatatagactacttacaaaactaattacataaatgaaagctaatttgcgagataattttttaagcctaattaatccataattagataatgtttactgtagcatcacataggctaatcatggattaattaggctcaatagattcgtctcgcgaattagtccaagattgtggatgagttttattaatagtctacgtttaatatttataattagtatccaaacatccgatatgatagagacttaaagttttagtcccttctaaacaggatctgaagctatttttaaagactttccttgcctagctaacccttcggtcgaaagtctatgttttgcttagagtagactaggcaagctgcaagcacatgtgtgactaaactgtttagtactacctaattaggggcacttacaaatttatcactggtttaaatcgttactgcaagattgtccctagaaccatcattcaagtgacatccttacaaattaaaaaaaaacagtggcaaatttacaaatgcccccatcatatcaaattaatttcgggtacggtcattgggattaaccccccaaaaaactgtccattaaaatccttgaacttgatactgtgttgttaattaagtttgtaccgtggtcttctcactatggccaaatatcacaaacaagctgaaagtatatgtaagggctttttttcctacgagcatcagtaaagttttaattttataaaaagatcgaatactcatattcacctcctgcactgaaaaaaaaggtgtcactaataacgattaattggatcttgagatcaaactacgttgctcatgatgcatttcagagatcattagatctggcattaattcatgacaattttgtgagacacaattcacatgcatgtgagtcagggatatacctttgcctgattatattggtcataattgtacatcgacaggagtcagggacgatgtacctttgtcttcactaagggccctttgaatcaaagaatttatatagaaatttcataggattcaaatcctatagtaaattttcctatttagctctttgattcaaaggatttaagctttccaaatcctatgaaattcctatggaatggcacattgcatgtgtattttggaggaaatttagcaagagctccaacctcttggaaaatttcctttgagtctatctctctcatctgattcctgcgtttttcctgcgctccaatcaaacgaccattcctgtgtttttcctgtgttttgcaatcctctgttttacacttcaattcctgtcataattctgtatttttcctaatcctccgttttttctaccctgcgattcaaaggggccctaaagttttgctagttttcacccattagacaaaggactgaggatcgaccattgcaatcaacagatatgtaagcagataaaaatgaaaaaaaaaatgaatattaggaaaaaacctaatattaaataattagaatgggtgaggcttcgaacccagatcgtctagcccaccgtcttatgaacctagccggaatacccctagacgttctcaggcagttaaaaatgaaatgcaagccaaaataatatttgcacgtataatagtgttcacaagttaacttttgagtaccactaattaagtaaatatagctcctttaaggctttaattaagatgggtgtgcatattcattccacgcatgtctcaagcagattacgtggtccacgagttatgttcatgagttatcaaccatatacagcaaccgcaacttggtgaaaactgtcggatcaagctctcactacaagaatccgtaattttttttggcggtcaaaaactgccaaggttaattattccgtcggccgactgccaggtttaaaaagacagaaacattacgatttcttggcggctaaccgtaagaaaatatcttcttgacggtcggaccgctaatcaaattaagaaaattgtgaactttcgaaagcgccaaaaaaaaataaccctgtcgtcggctcatgttctctcttttccctttttcctccagctaatcacgacagttgatgtggcctccatatcgtcagtccactgtcgattattgtactcgctctaaaagtcagtgctggtttggttttgccgtggaagttcgtacgtcatgatttgtatgtgctctaaaactgatagcgcgagcacatagctatccacatgtgagcacaaagctacgtcatgatttaaaacctgacggtcagctttttcttaaaagtcaaaggtaatcttgttttttaatgtggtttttaagttgaattttaggtgtatatatattttttagatgggtacttctctttgtattccagaaaaggagactgggcaacgaaagagaggagaaaaaaaccctccaaaaaccaagggcaacaaaaccttcatcattcattcactatgaatttaattctcatagatcaaaatgctccatcactttgtgttccatagactgtatcatgttttaaatattacatagtgttgcaccgatagaaattaatgttagttggttgtgtgcgtgtaacgtattcaacgatgtccatttactttttacacaaataaacaaaaagacttttgttaattaaatgatgatcattttagtaagatatcaaaaattttagatgattgttaaactgggatgaaggaagtagcttttaattcttattaagataagatagaagcaatatccacacgtttcacatttcttagtgttgtaatttgtgttatgttttgaggacaaggcgactctcaactagtttcctctggttatggaagcaactagatgtgtggacacgatccggcctataccaccagacttcttctgcatgggcctagctctcatatgagggcaatcaatcagtaatcctatttgtagttaaactttgttatacatcccgctatttaagagctaaactaatcagcacaaaaatatataatcgacaatgtcaagatttatctggtccttagaagattatatacatataactcacaatgttagttggtagttatatacctactcactaatattaagtatccttatatcgatactctcatagtcatatgtactaaagaaaacttgaaaaacagatacaaatatcaaatttcaattattctcttatttgtgagatgagttataatttctatatctatactaattaaaaactatttagaagctcccacactaaacaataagatctggtcatcaattagatagatcgtatatgccctagatctgcatttaatataataaagtgttaaaaacccatatattctgcatgttgtaggaattaaaattccaaactgaatacaactttgattagttattagaaaaaaaaacaactttgattataaatttgaggcttatcaaaatatggaaaattaagctacaacttggtctagaccacattttgttgtaggagtagttgcatgcaggatatatctgctaaataggatgcacctagtatagctagctaaaaaacagagggatctcaaaacgataatactactaaaagacaacgtacgctacgtaccatggccaaattagcacatcagcacatgcacgcacagtgcaattcctcatcatgcaccaaatgcatccccggcggcccggcccttggtacttgccggccggccgccccaacacgggagagaaaccggacgtgagactacatatgagtgctagtggaggtgacgctaccagcgacaagtaccgatcgatcgacctttttctcgcagccatcttgctcgctgccgtcgagcgcatgggcttgccggtaggtacatacgtacaccgccgcacagtgcgcgactacggccggccgtccgggcatcgtgtgcatgggacggacgacggacggaccgatacgcacgccgtcccgaccgctggccaaaatggacggacacgcgcgcgatgggcgcgcgcggtagctagcaagctacgcgggccaaaagacgacggatccattccgcgacaggccccaccgccaggggtacggcacggccgtcgcgtcggggtcatgcgcccccgcgccctcctgtacggcggaggctagcgacgacggacggggcgtgggcagggcggcgtcgccccggtggtgggccgcggccggccggcgcgaggccggagctggaatcacgccatggtggccactatgcactagctagccgcggccccacgcccccgcgacgttacggacgtttgcgcaccacgcgcgccgtgcacctgtccccgccgcgcgcgaccgctcgtccgctaccgcgcgctgaagccttagctagtggcaacggacaagggcaaacaatggcatgcatgcagctgccggccgggccaccgtacccggctggaccaccaggtaagccatgcacggcttggctgatcgatcgacccaactctaaaaacttcgggccggctaaggcggctgcatgaccaagctagattatcgacacatgggcgttgctggcgaataattagcgtgcatgtcctagagctaccagtctactcgttcatgtacggattaagagcaaggctaataatatagccgatctgttggttataaggtttttttagccttctttcagtctacccatataataattagctctttacaattaatatatggctcacttgtctcgtctctctcacagagtttcttggttcttgtgtccaagccggctgtaagtttacagcccgcttctcctttctctcttctctcttttctcctccacctcagtatttagccgacttatagtctactactatacttgctctaatggcggcccgggaaagacgctttgctagctataggtagtactagaggctacatttcgacagtgtcaggtgctaactttagagttgtcgccattcttttcatccgtttttaatttattccaagtgtttagtgtgcgtcgtcgtcagctaggtcggtccaagagagtagactaaaaaaaatgtgaatcaggcataattcaaattgtgtcatccctcggaaaaaataattatgggagtactaatcaactaaaccacatgaactcagcgacgagcccaggcatctgtacaacagtacaaggctacaagccgtaggaacggtttgaaattttggatcagcatggcatatgactagcacgatctagctagggagcactgtcacatgcatgtacggtatgcgtgcctagtgctgcactgctgcatgtgcgtgcccctaggtgtacaactatctcaaagaaatgggattcataattataactccttgcgattacttgtcattctaacgattaattttttttataaaaatactaatcattttcacattccaacattttcagagattaccttccatctctactatttactccctccgttttttaatagatgacgccgttgactttttctcacatgtttgaccattcgtcttattcaaaaaatttacgtaattataatttatttttgttatgagttgttttatcactcatagtaatttaaatgtgatttatatcttatacatttgtataaaatttttgaataagacgaatggtcaaacatgtgagaaaaagtcaatggcgtcatctattaaaaaacagaggtagtatcaatgaaggcatatacaactgttaaccagagtttaatttactttgggagacgatgaaattaggatgtaatttgtcacaactccttattccgtatgagatttttaggatgacaaataatctgaaacagagagtacgtattcggtagttgaatgatatttttaacaatttgttatccacccttgtgctggataataggacagcggatcatcgcaccttgccaacaaaccgccctctaccaaagctgcctatgatctaagcttttctgagttaccggttgacccatttgctgggcccacttgggacaaccatgctcaaaccaaatgcaagatcttcctttggacggcgcacaagagacgtatctataccaatgacaggcgggtgcggcgcggactagcaacttccgcgtgatgccccttctgccccatcgacacttctgccccatcgacaaagatgtggaacatctcttccttcgctgctcctgagtggcagccatttggcactcctatggactcgatgaacagcaagtcgcctccctagcacagctcgaagacctatggggcctcccactccctgacaatgctctcacccctcgggtctggtgcactatcttactcgccgtcgtttggaacatctggaaacgccgcaacaacaagatcttcatctccatcgacgaaaccaacacgctagttcttcgtcgctgcgccaacgatatcgagttgtggtcaaaccgatgtaacgacattgtaggcaaacaacaacttcactcttgggcgctaaatctttctgtaattaaccactaatttttagtttcttctccctgtccctttgtacctccccctttgtgaagatttttaccatatgaataaagttcaggctggtgttcagacccgccgtagttcctaaaaaaagttatgtttgacggtcaaatttactcgagatcatggtaatacttcacatcaaactaacaccgtgctaaccttctagccattgctcctgcacggtgtctctctctgcagcctacctatcattgcacccctccttgatgcctcctccctccttcactttacaaccatattcttgacaccgttataaacttaatctggcgcacaacccttctatgatacacctcatttatttctagcaacttgcacctttcgaatcctctccactcttagctacgttttaacaactttgtaaagccactaccaacgacacacacagccctccttctctctcacaattggcaatatggcaccaccacactacttgagtgctgacttagatggtgtttggatctagggactaaactttagctcctgtcacatcaaatgtttggacgctaatttgtagtattaaacatagactaattataaaactagttccataaataagagctaattcgtgagacataattcttaagcctaattaatccataattagcacatgtttactgtagtatcacatagtctaatcatggattaattaggctcagtagatttgtctcgcgaattagtctaagtttatagaatgggtttgtcattagtctatgtttaatacttctaattagtggcatttgtcatttgctagtctaggacaacaaattttgctaaaaagtgctccgggaccaagctttctctctatctagtgctaacatagcaaaactttaggatgcatataaacactaactccatgccaaattttttgccaccaaaacttttgccatttgccatttgtcatttcaaatggatctaaacaggcccttaattcacacatagctaatctaaacaccacggctaccatgaggaagtactcatttgtacatcttactttagttataggtgaaaacaggcaaagtgtattcgatctcaatccaacggcctataccagtcagctaatattcaagaaaatctcacaaccatgatgtatatcaaaactgcaaaaaagaaaaaaaaacttaaaattgttgtattatgcaccataatatactatgtattatctcctcaaaaaatatactctgtattggtctggacacaagagatagcaaaccgataaaataaaattataatgttataaatagagtatttggtccccttcgaaagctgacctgtgtgacgcgctcaatcaaaattttcccatctcatcctttaaagtttagcctatactcgaaaaggagtcgaacaacaatgagatcaatctgcattcaaatctaaaccaattaacatatctctagatctgtagactacgagaagaagaagaaaaacaacaagtgacgtctacacaaggcagagtacatcctattgtgcagtggtgttcccacgttcaattacctagctagggtcctcaatcctaaataaaatacaccattttaattaatatatgaactaataattagataattactatgtattgaacttccggtaatttttgttataattttctcactgttattgggcatatttttcctcgtagtaacatgctttagactttagctctgggcaatgacgagggaacagtgtccagcaaccttcttctcccggttatgtagaggagtcaacaactgggataggtgctttccacgggcacgacttgggcccatcctgccctggtctgagccgccgattcaatgatcgacggcccagcaaatcactgggcgctcgtaccgcgtgcctcatggggaggcccggctgctccggggaaaaaaggagtcaattaagcagtgtgccgtgcacgtactgttccatatgtgcagccaagcaggtgatcgaccataggcacaaggcacgtacaaactgtgaaactgaagcgacgaataatgatcagcttaattactttaattttctcgttaactagtcaaacactttaaggtaacctacaatttgcatgtctcagttcaacgcactggtggtgcacacaatctgccgatgcgatatgcacgcagagagttacgtatcttctgtatttttggttcctctttaattaaagatcttgtgtattttacgcgttggcgtgtgaacgaaaggggcaaattgcggcgcggcgggggcattgcattggtcggtagctttcccgttttatttctctcgatctcggccggccgaccaagatcatcagctttgcgacctcaggacggctcaacctgaacgtgctgatggagatggaccattaaccaactctgagagaaagattaattagagtagtagtaagacgttgtactgatagtactccaattaatatatcgattacgtagtgtgccctgtgcagaagtcctcctgcgtacgtacgggtgtgggtctgaatctggagaggatggaaaagacgaacagtggaaccgtcacacgtgcggatgtccagggacaggcaacagacatgaagtcgttagcacgatcttaggttagataccctggtcccaccgccacgaatagtgtgggccccgcttttttgcccggctcttccgcatttccaccgtgtttagatcataattttttcttcaaacttataacttttttcatcacattaaactttcatactcacataaattttcaacttttccatcacatcgttacaatttcaatcaaacttttaattttggcgtgaactaaacacatcgtgagctcacgacctcacgtatgtaaatcgatcggccattggggcattattttgggactagtttagagtacgtactagtaccatacgactccaatatgtcgggtcgaagttgttagggcctgttcacttgatgtaatttttaaggacatgtttacgggtcgggcgcccgatcggtttggagaaaaatcgggcgctaacatcagcatgacgtcagcgcccgatttacgtgtaaaactactttaaactgatttttctcttaaattatttatccaaatcatgattcgattgcaccattaaattcgttgtaattaaatcttcaaaacaagaccacacatggatatattccgacgaaaattttttttagcgtattattgaattatttttaaatgttgcacgatgtttcaccgggtatatcggaattgtttcactaagtatattgaaaatgtttcactcgtttaaatcgggtgttgtttcacctttatataaaacaatgtttcagcaaatagcgaaagaatgttttagctcactgcaacatttgatccatacatagtgaaacattataattacactaggtgaaatattttttggtggaacaaaaataaaatgaattctcttaatagggggcttctaaaatatgtgggttttttattgcaatggaatatttcaattcactgcaacattagacctatacatagtgaaatattgtgagtacactaagtgaaacatttttggtggaacaaaaaataaaccaaattcccttaatagagggtttccaaaatatgtgggtgatttgttgcaatggagttgtgtggataagtggcaggtggggacaggggacatgtggtgggggcccagagaggctgctggtgcgcacgtgatggggggaggggggagcgaccgatttttccccctccccccccctcccccgccgcgaccgagaaggagcattatcgtatttttaaccataccattttttttaggtaaagttgctacaaaaatctacgtttagttttttactaaatttggtcaatacataagaaattctgctaaaattttgacaatattgctatcttgctaatattttttattggcaaaacttgataaggtttatttaggttacaatctaaataagtccttaatatctttttcttcctcttgctcttgcgacttgtgtagttgtgtcatgtgagatgagatctcttgttatcatggtatcctcacacaaaagagaaatcaagttacgagttacgacatgagcggagctgattaatcaaaccatcaactcgttacaactcgtggtaagcagaaaattaaaggcgtctaatgagtactgcaatgaggtccagtccaacgtacaacagctcgtcccgtcgtccgttgttacagtattgtctttgtccactttgcacggtttctaaagctaaggttcaagaccaacttgctctgttgcagtaccactccatgtctccatccgtacgtcttggacaatctgaagctacggtccaaaatcaactccttttactgtgtcctctctaaccattttccacagtttaatctagcatgccactcctgttgtagtattatttcgaattgaacatttttacacatgtttcccttttaaatactaggtactccttatgagagaatcacgctagtatgaaagtacaaatgaaacattttggttgcactaccacatttttacagtgacctgtatgcagtcaaattaattattagttgaaagttaagagtgaatgaatctaaaacaccagggtgtgaaaggatatgtagccggtcgtagtgagtatctcaaagttctaagtttaaatctccatttgagaaaatttcagattaggttgcttgatgagttgaatcccaaatttaaaaggttccatatatccggttggatgtaaagaccgagtaaaaaataccttccaaaaaaattctaaaataccagggtactaccagagacaacctttttgttgtcaattccggatgtctaattgagttgtagtaacaaatcatttcttcctatatagttgatatccactcaagtcattaactcctataaagcagctctcacgttaagccacatcatcacaaattcctgagccgttagatttgatctcaatgttccaatccaaacgtttcagcatgcacgcgtcagagaaacacatacttgatcagtacctgacggttccaatgcatatagcctgcttaatcttccaattgattatggaaagaggggattaatgcatcatgaacgattcatttacaaaccatcaaggaggcaagaggggattaatcatttactctataccataagtccataactccgtctatactatatgtattgccatcagatgttatattgtcattcatttatagcatgcatctgttataagtcctctacacagattgcttatccatctaggggtactccatccctgaagcttcatcaagaatatattcagcatccatgtaggcgattagcaatatcaatgatcgacgaagccgattggcaatatgtgagcacccggtctccatcccaacctcatgattcttattgattgatgttgtgcttaactgttcattttcttatctcaggttaaattccacggtgaaattgctaggcaatacatgttgttagtacatactccctccgtttcacaatgtaagtcacattaacatcaatatgaatatgagaaatgctagaatgacttacattgtgaaacggaggaagtactactttttgcctttcaggtctcatatgattttcatgactaatcattagcgttcagggaacttaattaaagtgggtatatgctctctatttgtagaattttatatttcccctatgttaaacatttatcctttcggatagtcatgttagctactaatctaagtgtaatctttttgttaaaatccttaatattaagaattgtaatgtgttttgaaaaaccaaagacaaaaagagttacagtgtttctttatatattcctctacgttttgtgctgatagatatttttcaaataagtccgcagcaacgcgcgaggtatcaactagttaatcatatgaaggtggtctgatgggcacgcatgctaacttcgcattggtgagatgagatctttcaacggagtgattattgcaggttgttggcaattgtctggagaagtcataataacgctgcatttgggcctacttctctagtctgatccaacatgcaggaagattgtagaggaaactctcttttgaaggtctcaaagccttgcttctggctaatatgtcggccccctcccgcactcccactttgtcctcgtgtactcaatcttcttaatatattggttttatctttttcgtttacgtttatatttatcagttaaattttaaattttcaatttgaaactgattttaaagttttttattaaattttatttttcagcatttgcttttagatcgctaaaaacacgtatataaaagttttattcataattacttttcatttacaaatatgttatttgtttattcaacgaataagcgaaacgatgggacaagtgctaatttctcctttctctcatccccgcccgggcagcatgcgtgcattacgaacttgtattaagggtatagaactatacttagtactccacgtgctttgattgggctgcttaatttgattgcaaacccaaaacacaagtattatcgtagttggaaaaaagaacaactactatcaatatctgctccatgcgtctaattaagctgacaattagtactacaaaccacttaagatttctgaaagctacgccgtaacaactatagtaagcaataacagcgtgccatcccctgtgcctgcaaaactgacaagaggggtgcttttcacagaagagaggtttggaccatggaaccgcctggattgcctgaagtataggagtaaggagtagcaggctgatcagatgtcgaatcctcctgctgaagccaagacggctggcgcacgagcacgactgcgcgcatacgcggtacgccgatctggtcatagtcggcggccgcaacggcaaaacgaacggcgcgcgcggcgcaatgccgtatacatgacggagaatctgcggactagtagtagcaggcgcgcgtgcgtggatcgaccaccccacccgccacccccgcctacggcgtcgcgttcggcgtttgttttatcgtgacgacatgtacccttcgtacgcgcgcgcaatcggcatgcggccgatcgaatcggccgaaagggtcatatacgcagtgagccgctcgcgcgccgccgccatcgccgaagaaaagaaaaggatacgtaaaagtgccgcacgccgggagaagggcactgtttcaatgtgcgcgatgggacgtgtgagcctgtgtctatgtgcaccagcgcccaacaggggaaaagtagcctccgtacgaccaaacgcaatgcccaactgcccaactgcttaattatcgcctctagaacggcttcctcaagatgtcgagagaccgtcccaaaacgaaccaaatcctgaaatttaaggacccattttaagtcatataattgataaaaaaaaccttataagatttaaatttctatatttttttacatgttcatttgaaccaagaggtatgagtgtatgacttctttgcgaacttttctcttttctttttctatcaaaggacccatattatattttttgtgttttttatttcaataggatttgagaagcatattatttcaattcttgtatttttcttatttatttgtttttcctatcctgcaaattaaagggaccctaaattttgtttcaaaataaatcaatttctatattttgaattttaaagttgattttgagatattctcaacgtggtttttttcaacattatcttttaagacgctaagaatatatgtattttatacaaattatttttcgatcattatactaataagccattataacttataattagtttgtggcaaccgatgactcttaactatcttaactatttttgagcggttccatttcttttaccttgaaaattaaggtgcgccgtggaccgtggtgtactgctgtgtaatgtatgtatgcaaatgcaacaaaactttttttatacaactccagtttgagtatagtactaactgtgtcggaaactacgatcaaattaataatatgacaatgtgacaaattaatttctgagtttagaatgaggcgtccattcgggcgcgatcggcagttgaacatttgttgtccggaaagatagaaagggatttgtgatatgtgcgcgctattttgtcgactaatggtccacatgacacgatcagctgaacaaatgggtgatcttggggttatatacacattgcggtcgcgatgcatgaacagtactgctgctttgaccaatcattggagagacagaaaacagtggaaaattttagcaagtgcgtgggctccttgtcgcagattactcggtttatattagtttgtgaagggaaagagcgacgaaatagcacaaatgttggactctagcaaattcatactccatgcacaccatgtcagaatgcctggcccaattctttttcttagttctaaaaaaaatccttttctcaaatctaaactttaatttcctcgttttccgtcaacacatttttcaaattattaaatagtgtatttttacaaaaagttactatgtagaagttgtttaaaaattaaataaatttatttttaattttataataataaatacttaattaattttgtgttaatgagttttctcgtcttgagtacgctgaaattatctctcatatctctctcaaatgagagagatatttttcttcatcttgcgtatgctgaaattcacttttcttcatcaataaagcttttttttttctagagaacaaacggggccttatacgagtagcaagtccctggatttagtgatagaataatcatatgagagtcgttgttcacataaggattccaaccctaacgagcgaagtcaatttactcatgactacgctgccttaaaagtgtttctcaaacaattcacttttcttcatcaataaagcattttttttgctagaaagacaaatctaggatgatttgagtatatctctctggtttttaatgtttgatgttactattttttaaaacacggtagacgcccacaatacggacacactcacccatatttaagaaaatatgtaaatatgcaaaatataagttatgctaaagtatatttactgataaaataaattataacaaaatgaatgatagttatatatatatttcaaaacaagattagtattgatgaaacatatgaaaaaaaagttaatgacgaataactttaaaaaatcggagagaatgtttggacacagctctcgtttttctttcacaggtgggacccattttcgattttccagcactggcaaattttgcaaattattttgtgttatgcaaagaacgcggctattagtccgactaacgcattcgactggcgtatgactcaacaaagaattacacggtgtgacttggctatatgggctaccgctctcactgccccatacgtaatataacccacatcaaagcccatatataatttcaagcccaaacttataaggacacacatgtccttttagctgcacggcgacattttatctcatgtctataatttttcagatgaaaacttttagagtttttcaactactgcaacggcaacaatggtaacagttaacgcgagtcatgcacagttagtcaacaaatgtaaatccacctgtactttcacagccaaaatttgtttgattagacatatcaaataaagcaaggcaccacgattttatgttccattttcagagtcacaactagctagtttcattgaacaaaatagaaaaccaaaacataacacactgggcacaaataaatcagcagctttcacacaccttatgtgatgtgatcagtgaatactatcggctagatgaaacaacacggacgtgcggccaaattacatctgattgaactcaagcaattggttagagatagaagacaaaggaattagagagtttaggatagaaggagatggaacgtccggttgtggcaatattatcggctggacgtgactacacagctagtggtaactggtttgtctaaatcagctaccactccatctatgagagacactattcacctatacttaaaatacaattttctcttaaaaccactcatccgatatacgatccgattacatcgttgtattcataacaattaaatctttataacaagatctcacatgattatattttgatgaaaaataataaattacttttataatatatctaaattacttttagatttcactaaattacttcttagacatataaaagtaaattcaataaagcctaaaactaatttacatactccctccgtcccaaaataagtatagttttagcactgttcatgtccaacgtttgaccgttcgtcttatttgaaaaaaagattatgattagtatttttattattactagatgataaaatatgaatagtactttacgtgtgactaattttttaaatatttttcataaatttttcaaataaggcggatggtcgaaacgctaaatacggatatttatggttgcacttattttgggacggaggtagtatattatagaagtaacttataaaaaaagaaagtaactttaattaatgtcttttttcatttaacaaattatcatatatatatatatatatatatatatatatatatatatataagttacttttagatttgattaaaatacttcctatatattcataatgctctaaggtgattacttttattattgtttttagttaattccataatttgtactgattaatttaatttctagatagagtgatgtttttatctctacaacggatttacttcaaatgacatgccaaagttatcttcgttttgttataaattacttctataatatatgtaaattacttttagactttaccgaatttacttttatatttaagaagtcacttagtgaaatctaaaagtaatttagacatatcataaaagtaatttgtgattttttatcaaaatataatcatgtgagatcttgttgtaaagatttaattgttacgaacacaacagtataatcagattgtaaatcagataagtaatttaagagaaaattgtgtttgaagcatagatgataggaatattttccctacttacttaatggattagtaatatagtaaaatcttcaagttagcataaatctagataatgctgatgacgtcactcgttatgactaaattgagagagtgctctcgatttagattttgcgttggacagatgaaatggcgcgcatgcttttgtaaggcccaactgaattagcgatcgtgcggagattcggacggcggacgtcacagtcgtacaagagtcggacattgtgtgtatagcattttcgttatgcaaatactaggcggtaagtgaaaatgatgctgcagttgtcgctaaaaagaaaactactgactgtaacgtcctctccataataaaagttgactgcgacagcgaagtttcgttagattaattacataaccataccaaggaaattccgcgtacttagctatcatagctgagaggcaacaatcaaaagttggctgtccttagctgtccccactctgtaaatcaagcaatctaataagtggtacagatcaaatcccaggtcgacaatagatttaaattttataggttaaattgtaatggtttaaaatttttaattttatttgaagtgaaaataaaataacttatccaaatattatcaatataataataaatttgaatcatggatttgtggaggtgggagtgggattacccacctgaccagcttaaaaaaatattgttgtgcgaaagaggacgaggtttttctttttcaacgtttcaggccgtttatggggtgcaattctgtgcgcttatgcataagcctcatgatattgagttcgcgaagagattaaagatgcataatgcacgtatggcatattgccgtattcgggcctttctctggagaaataagtttaatttaggtccctcatgacattgagttcggacgatatcttccaatcataataacaaatataatgcatctccttcaatttataaaactggattacccgagatcctaaagcagtattatgtctagttttaactgacgtggcaaactgaattagcatgggacgacgagggtcctacatgtcatcggccaattctttctttctcctttctccccctcttttccttatcttcttcaggacacggttgaagggagaagggtggaacgcgaagggagaggagccgcccacagccgcgacggcgagggagcctcgggggcacggtactccgccgagcgcgccgcagcggccgccgaggatgagcccagccgttctaggccgcactctgcgagccacgccacgccagctttgttgagcagtatgttcgtgatattgatgttgtcgtgcactagcctcggcgtcccgcttccctggcggctcgtgtggtggatgttatgtatgcatgctagctaggccacgcacggtggctgagctaccacccagtccagtcgcatgctcccgaggccacggttgcctgtaacatgtgtgtgttgctgaactataggttgaggcgatatagctcgtacaattcccccattgacggtggtactgcgccgtacatcgagttgtcaatgagaaacaacagcttgaggttggcgagtggcgagaaggttgagaatggcgctggagaggacctcccccttgagactaagcacgcggaggccgtcaagaactcaagcctcgcgagcggcgagaggtcgagaatggcgctggagaggccttcccccttgagactaaccacgcggaggccatcaagaactcaagcctcgcgagcactgagagtgcaacatcaccggataggctgaaacccttgagcaccagccgtgttaccaactattcttgctaactttatagatttgttcatgaagagattaatgcacgtatggcatattgccgtattcgggcctttctctggagaaataagtttaatttagatccctcttgacattgagttcggacgatatcctccaatcacaataccaaatataatgcatccctcaatttatctttacatcaaagttatagccgataaattatctttacatcggactaaaaagccgatgtacgctttaaccatcaagtctacatttaatattacgtatcaatatcaaacaatgccaatttcaagactctaaagctaatactagctctaaaccaaagacgatttcggatcttaccaaattttagcattaacacctgccatcttgtgcagatgacccgtctcagttagataacgtgtagtaccggtcggcgcccaaccgcaagtctgacagcatcgcattgtcggtataacatacaaagcgtcacgacatcagtgtcgacaagaagagcaacaacagagtggcgtcgccaccgtcgctattgcgaggcatatgctccgtagtactctttttattttgttcaagcttgacctcacatttggcttgtgtgcgcgccactagtgacagcgacgtgacgaggttcttgtctgatgctccccacctcccaacaacttccctggttcgacgccgctacccaactccttcttgccagccacacgctgcccttttccccatcagtcgtcaccctaaagaaaatagcaaatagaggtggagagaggaggaagaaataattggtcgctgacatgtgggatccacgtagtcccacgctgattcagcttgccacgtcaactaaaaccgggcataatactatcttggatatagggtatctggttttgtaagttaagagattgttatatatgacaagagacctaacgcggccttattcctttcctagtatgtccttcttagccttccggcccagcaataattgcgcatgcaatgcaccaccacttttaggcctactagttgttcgtcatggtctcgcactctctgatgtggtggcggcagagatggcaacgggtgcgtacctatcgggttcgcttaccccatacccacacccatggaaatcaaatgtccccactccaatacccacacccgctcacgggtgaaaaattcccccatacccacacccgcacgggtgacgggtacccattgggtacccatactcattggagctgatcaaattatgcacaattgcacactaatccatccagttagacaacccaaccagacagcagtacaaatgtacaacacatcatagcagtgatttttacaaattaggatcaaaaggtcaacaaattaacaaatcaaatggtaattcataagtctgatgccaggcatgcagtccactccaacatacatccagccatcctacaatgcatccaaagaccatcgccatgctgctgtggagttgggaagagggaggtgtctggaatttttgggtatgaaggctgaagaaggcgagatggcgacgcggctgcagcctcagtggctctgccacgagcccaccacagaatccccaagtcctaactctagctagccacctgcgccctgtggtcctgcctcggcgagtcggagagcggcccctagcctcctactgcatgcggcggcatgggtgacgtgcggcggcgcgacagcgcaggtggagtgcgcgcagcgagcacggggctggcgtgcggcggcgcaggtggcacgagtgagctcggtggtggcgcgtggcgacgctggcgtaggtgggagtcgcgggggcggcggctagccacccaaacaggggagagaggagtaagggagaggaaatatgtgagatccttttatacctagggttagatacttagagttgttcgtggggtttgggctgcacacctattgtgggctgcggcctatgggtatttttaacccacgggttaagttcgggtgagtagagaacgttttaggacccgcctcacccgatgggtgaggtttttggccgataagagacccatgggtttaatatttgaaacacatttgacttctaatagagtaaagacccatcgggtatcgggttatggggccccgttgccatctctaggtggcgcctttgcaggcggtatgtacttcctgggacgagaatatatcttgccaaccgcaagcctgaagcctctccttagcgatggcagtgatgcccacggagtcgggtatccgtggatacccaacccgatgggcacgggcgtgggcacattcttttgtccgtgagcatgctcaacctgtcatccgcgaacttagtgggcacaaccgggcttcatatttcacccgtgggtaacccatgcccggcccgaaaacttatagcccatgtatgtccaattatccattaaaccttcaatagtttaatatccatcctcatttatacaagtggtatatatattttaccctaaccctaatctctcctcactcctcactccctcccgtctctctctcggcgcagtgcacggtagggggctgcgcgtcgtcggcgcggctcactggagggggctgcgcatcgccggcgcgacaaatgggagggagcgcaggcggcggcgcacatgcgcacgggagggagcaagcggcggtgcacgcaggcaagcccgtccactctgtgtctccgtccttgtagcatgttcatcttatgccagatctgaaattgatgttagtatttgtgtatgcatgtttcttatgccagatccagatctgaaattgatgtttttagtatttgtgtgtgcatgttatttatgcatttatagaagtgttgaacataaattatacttttgttttcagattatgtggtatctagtggatacccatcaggcatgcccgtacccatcgggcatggggttttgctcgaaagacttggcggcgtgggtcgggcgtgggcgtgtgggtctcgggtcgggcatggaatcgctctacccgtgcccgacccgacccactgccatccctacctctcctgtttggtggtgatcgtgtgcgaatatgtaccagtacttcagataaagagacattgaaaaccttattgcaaaaatacatgatgcatttacagatctactcactttgtcccaaattttaaggcttataatttttttacacggtcttcaataatgtactttgaatagtattttattttattctatgatcccaacaaatatgaaattagcatcatatgaaagtattttaaaatatgaatatagtgatataacatgcataatactatttaggcagcgttcgagagggtgagagagtgagtttgtttgtttcgttttccgcgcgcacattttccaaactactaaacggtgcgttttttgcaaaaattttctataggaaagttgctttaaaaaatcatattaatccatttttgaaatttaaaatagttaatactcaattaatcatgagctaatagctcacctcgttttgcgtatcttcccaatcttctcaatccccttctcctcaaacacacccttagtatagatatagttagtatgattattagtcaaaactatcgagtttgactttctttaaaaagtgggcgccctataatttaggatggagggagtattcacaaactgaatcacgaatcgaacatgacgacggtacagcaggctgtgttcttttcctctcttttccaactcatttccatcgttttctacccgcatgcttttcaaactgctgaacggtaaattttttataaaagttttttatataaaatgctttaaaaaatcgtattaatccatttttaaagttttttaggctaatacttaattaatctcactataattgtgtgctttgttttccatgtcgggaggcaaggttaacacagaagtaatgtacttggtaatctttgactcgcgtctggtatcactacagcgcctaagcctaatgtatggccacactttcgaaggcctagatcaccgtggaagaaatgaagaattcggtgggagtatctaaagtttagaagaaaggaataacacaccaggagtatatttttgggctcggtcgatttgtgacaaagaaactaggcaaaaggaactcctttgaaaagaaagagaaaaaaattgtaatccggtgttcttttggggaagctgagaaagtgtagtatcgaaagtctagagctctagacctatcgaaaaaataaggaaaaagtgcaccggaggtccctgaacttgccaccgagatacgaaaacgtccccaagccacaaaaccatatatatatatgggatcccttaactatacaaaaccggtcacccaaagttcttcggtggttttgaacccagttttagtctacatggcggctgagtcagcgtagaacccatctggcagcatgccacgtcatctctctctctcttcctctccctttctcctctctctctctcttcacttttctccagcgggcgtgggcggcgggggcggccgcagcggcagcgctctgagaggaccggggacggtggaaggggaggaggggttgacccgaaggtgctgcggtcgctgccggtcacggtgtatagccgcaacacagtggcggcggctgcgaaggaggaggaggacgacggcgtcgagtgcgcggtgtgcctcgcggagctcgaggagggtgacgaggtcaggttcctctcccggtgcggccatggtgccgcctcttcttcctcccgtcccgccggcgccgccgtgatgcacgacgacgacgagagtcgaacacgagcgcgctcgtgggcacctaggccacgggcccacgcagcgcgagcacgacatagttgcagtgcgccgcgcactcgaacccgcgctcgccctccgccgcggcgaactgcgtgtgcacctccagcggcatccgcgccacttccgtccacgcgccgcagctgcttgctccacctccgtggccgccgccgccgccgcgtagtgtccacaggcgtccacagcggagatgttcttgacggcgaaaggggacacgaggtcatccccggccacgacagcgatgatggaggtcgggccggtggtgaggccgacggtggtggagaggcgcggggtcggggtgatggggagtgcggcgaggaggcgcgtgattgggtgtgcgagcagtagcgtcttgtgccccgatgcatcggacaggaacgcgagcaggccggcggacgcggccacgggcgggagcgggagcgggagtgggaagcggaaccagctagagggttgaacctggccagcgtcggctacctccacggcctgctgctggggcggtcagcgaggccggcacggagctcgcggcaggtcaggaggtggccgtggaggttgcggcaggcgctgcgggtcgtcccggcggctagcaagggagggagaagcggagcacaccgtcgatgtggcgggggaggaggtggaggacgctagccaccatgccgcggcaggatctggcggcggaggaggagccgaggaggacgccgatgaccaccatggtgacgccgacgaccatcgggagaagcgaggaaggccgacgccgacgaccaccatgcttgccgctagtgggcgccacctccaccgcctctgcctccgtcaccaccgcctaccggttgccgctccccatccgccggccgccgctcgctcgcccgcctgtcgccaccgtcgccccgcgcctccgctccacgtaggcggcggccgcacgctcgcacgcttttccggccgccgcttagccccgctcaccgccgcccgttccttccccgcggcaaagagaagtgaaaaaaaaaaaagaagagcaaaaagaatgggaaagagagagttgacgtggcacgctgacaggtggggcccacgtgagtcccacgctgacttagccgccacgtagaccaaaactggggttggggtcaaaaccaccaaaagacctcgggtgaccggttttgtatagttaagggaccccatatatctggttttgcggtttgaggatgttttcgtatctcgtgacaagttcagggacctccggtgcgcactttttccaaagaataagatcggacccaaaaatcatggcccaatatcttatgtagttgagctgggcctggagttaccagagtaggctaaggaccgacgcttttacaaagcctagcccaagaaatactccttcagtccaatagtccctcactccatcggctcggttgtatagtactacctacgtccgatgatttatgtcgctttaactttttctttcaacgtttaactatttattttattttaaaaatagtgcaaatataaaaaggataagtcttaagcaaatcacaaataaaataaataataattcctaattttttgaataagacgaatgatcaaacattacaaacaacaactcaaagcaacaagtaataagcaactacttatatcatatagttctgctctgcactccatgatggaattatcacaatcatcacccaatcaaccatacacgacaggagtactccctccgtaaaaaaaaaaaaaaaaagacaacctaggtgatgatgattttacaccacctaggacaaagaatttgtgtgaggtcaaatccccacctaggttgccttttttattgggacggagggagtactcttacagtactccctccgtcctaaaataagtgtagccacgagtttccgcgtccaactttaatcgtccgtcttatttaattttttttggaaaactaaaaaaatacaagtcacacataaaatactactcatgttttatatttcagtaacaataaaaatactaatcataaaaaaatcaaataagacggatgatcaaagttggacacggaaactcatggctgcatttattttaagacggaggtagtaaaaaagagatattgcgtacttcctcaatcacataaaaaactaatgtattagatgtgacgcattctaatactactatgtaaaaaaaaagaaaagacaaactctagttatgtgtccagattcatagttatgattggatatttttgggttgaaggaggtagtattacgatgtgttatatccggttataaattagtcttttgtggaattgagagagtattttaagctgggctgctctagaaactttcgtgctctgggaccaaaaatacacatgtagaggtgtctccatcaagattaaaataaagagctcgagtttagctgtagcaaatccatagtaccgtatagtatcattcaatacgctggccacctaactgccaaaccaacggtcgccatttatccagttgcaaagaacctaaaaccagatccagctatggagaagtggagccagacagcagaaaatatatatatatgcaagtccctgtccatcacaattggcaccccaagaccaagtccaacataactgccctataaccgtggagtgcgatcctttgtggcagcgcctattatgttcattgttgctaccctaccaagccaaaaagatcatgatatcctaattagatcggatgccgatcctatataagcatatttttaaaattaaggtggatttaaaataatatgaataagtctactcaaatttacaatatgtcaattgaatttgttgaatcaatattataggcttaattgtttctacaatttattacatgaaataaaatttcaagcgttgctatggcctatatataggaaaattatatgttaataagtaaaaaggagatacaaaataaatatgtatttgctttgtaaacattcttcttacatagatccttcaatgatgcaagatttatttcagacgtgtaactttataagagaagggagatttatttaacgatgaaatatgaacgatttgcaccattggtagataatacaaaggctagacaaaattaaggtgatatagctttgtgataggttatcccaaatattgtacttgtgtgatttagatgaataagagcaacaccggtttcgaccaacaggatgtagggctattaactgtcagataagaggataaggggtctgaacctgtataaaaatccatgtctccatctcttttacctcaatctcacatataccatgttaccaatgatacccatatcatccaaataccgtagtcgcgatcttaaacatcgatagaattgtcaaagcaccatccacatttgtaaaaaaaaaggatattgtgctgtcatgtggtggttttttttttatctatgaatgctaagtatataagtagttaatgggaaataactaagatatcgataatggatggggtaaacaagcatggaaataatctaatatttccttgttttagaagtgatatggctcaatgcatgttgagcttttgagcttttggtttaaactatatagaaatattaagtgatgttcagcgcgttgttgcaaaatctccactattataaaaattgaagatgtttttgtcggtattttggtacgtcatccgtgtatgagtcggtttttaagttcgtttgcttttgaaaatacatatccgtatttgagtcggttttcaagatcgttcacttttaataatacataacgaatcatataagaaatctgtttaaaaaaaactttcatgctaacttgagacgatcggactcctaactgcagctcatgattttctaataatatatatatccaagcgaactcccaaagtaaattccatcttaactaaaccatataacaataataagattaaaataaacttcatccgttacaacgcacggacatttttctagtacataaataaataaatgttaaatattataaaaataaaggtagctatataaaaaatattatgaaaattgatatgtggatgatgatttgacgtgcttgcatattgagttttagaatgtaataaaaaaatatagataatgtgatatgtttgcatgggttttaagatataacaatttagcgggtatggatgtggcattcgttcatgttgaactttagcatgtactcatatatagaaagtatatatatgattgcagattttatataaaactatgcattttgtaaaatatgatagggtccaattctataatttgattctacgggttgacactgttaagaaaaacaatcatcaagtattcccatcctgttaacattgatcaagtttgagttgcagatggtaggattcaaagatggtacgcattgctctgccttaaaaaaaaaaaaggaaaacaaatggtatggcttatatatggacggtcttatttattggcttatgcttataagttaatatttgaattttaaagcttaaatttgattgttttttatcgctgtttattttacaacatttacttatatattatatatataagttttactcataaataatcttttatttgctaacaagctattgggactgcgtttcacagacaatccaacccgtctcgcaagatgcaagccgggcgagtgcgcatcaaactgcccacttggagagatactacgcgacatcgccttctccggccgtcacagtcacactcaacacagacacatccgagtccccttttcaacatagcgtcgccgtcccacgagacaacgagaggagcgcgagatgggagccccaccggccacaagagaggagatgagagaggcccagagcggcccacttccgtcccatgcctgcgcgtcccgcgggtccctatcgccaccccgcgagctccagctggttccgacccaattaacgtagcgcccgccggccccgtctcgagcccaggccagaggctcccgacccggcaggtcgcgcgcgctgctgctacctggctggcgcctctcgtgccacaccgcgtagatacagttaacgcggcccacgtccctctccacgcgctaaactatatagcccccgcccgccaccacctttccctccagaattcaaaccggatcaacctcgctcgcttactcgtgtttaggcatggacgtttctgctgcgctcagcagcgactactcgtcggggacgccgtcgccggtggcggccgacgccgacgacggctcctccgcctacatgacggtgtcgtcggcgccgcccaagcggcgagcggggcggaccaagttcaaggagacgcggcaccccgtgttcaagggcgtgcgccggaggaaccccgggaggtgggtgtgcgaggtgcgcgagccgcacggcaagcagcggatatggctcgggacgttcgagacagcagagatggcggcgcgcgcgcacgacgtcgccgcgctcgcgctccgcggccgcgccgcctgcctcaacttcgccgactcgccgaggcgcctccgcgtcccgcccatcggcgcaagccacgacgacatacggagggcggcggctgaggcggccgaggcattccggccgccaccagatgagagcaatgcggccaccgaggtggcagccgccgcatcgggcgccactaattcgaacgccgaacagttcgcctcccacccgtactacgaggtcatggacgatgggctggacttggggatgcagggctatctcgacatggcgcaagggatgctcattgacccgcctccaatggccggtgatcctgccgtaggtagcggcgaagacgacaacgatggcgaggtccagctatggagctactgatcctgcgcgtttgaactcaacttggtttggcgcgaagagatcgcatgtacagcttaagggagtcgagtacaagtacctcaggtgtactccactcgttgcccctttcccttccctttcgtttttcttgagcttatctgcagggtaatgttatgtattgctgctcttctgatgaaatgtgatcggaagaagcggaaggccagatcgagcttatgggttctgaagacggtgaaggcttgtcgagtgttgtgagcatatattcagaaagtcaggcactgtgaaagtatgaatcagatcagccttgttacgaatgagagtgatcgaccttgttcagtgtttataattgaaccacttgtgtgtaataagcagcaaagccatgttgcttgcttgatctgactcttgggaatggtatatttctcaaagaatgcaggattgactactcagaatttgacattttgcagtgaaatgataggattgttaaattaacattggaggagaggcatgtgtatatatgttaagaaacattagtaatgatgagcctatgatacttcgatctgtagtggtttatgacgaattggaattctactcggttcacaaattcgtgagatcttgctcaaattttgagcatctcaagccggttcaaaatgagatccggaggtgcattctgaatagtgttctcaaattttattcgaacttagtgaaaaaaaacgtcttactgtggctcaaatttcacccgtcaatagagatttgttataaaccctgtcaatattgaggtgatacttaaccaaaaaacaaaaaataattattatcacctcataatttggattacccaaataaatatagtgcatgcacccaataaaataaaaatcttatggaggaaggatttaaataataggagctgttcagattgatgccatttttaaccataccattgttttttttacaaagttgtcaaaaaaaatgtccacatttagtttgttgatattatcaaaattttgacaggttttcatatgtatttatcaaagttaggcataaaactaaatgtatgcatatttttagtaattttataaaaaaaaagtatgatttgaaatagcattaatctgaacaaccctttacaaccggagtgcacattctatcagtgacagtgaacgcctcaatgttttttttttcttttctttttttgccaaactggtcacttctctaaaaaaatggacttctgaaatttctacatcacaaaacagttttgcaatccatgcctaggcatataatacgacccatagtctttgtctatcattaaaggcaatcttatttatacagtacgaagtaccttcgagctaaagctggcttaagaaaatcctatggaacattcttttgacagcgtcaatgaagctctttgtaaattttaggcctcaagctggcaagccgcgggaaaaggcggtcccagagtgaggtctcaggtcaggtcacctcgcgcgcgttgcgttgctggacaaggccacaacccacaaggccacaagccacacaactctcaccagacaccagtcgccactcgctaccaacggctttcgcggttttgccagctcgcgcactggctctctcgcgcgcgcatgcctttccgcctttttaccgggtccgtactccgtcgccgtcggctgccaaagaatcagaagcatccagtcctgtcgtcgtcagctcatcacgagaggatctagctagctagcaagactcggtccacggggaggagaaacatgatgcgtcgatggttccagccgccacggaatttagtagtagtactagtaggatttggtatgacagtaatatatggcaacatgtcatcgtgttatagcagtggtaatactgttagtacgtggctttacctgatagtaacgcgtatgtgtccgttacactttgttggcgtttgattctcttaaagacgaagataaacatttaagtatttcacataaaacggggtgataataatgtgtaattaattgagtttttattcttacaaacttaaaaaaatagattaatctgatattttagagcaacttttataaagaatgttttcgcacaaaatacactatttaacagtttgaaaaacgtgtcacgagtatccaaaattgtatcatctgtttgtagaagaaacggagtcagacagccccataaccaaaactattttttccccacaaaactgtttatataatttcagtatttccaaaaaatagtttaaaggctttggatgatagggacgagggcgttctctgttgtcatgtgcatgtataggtctattttgagtccgggcaaacttcaacataactatgatacaaaattttcatcagtaatttactcattaatattaaattttaatggagactagcaaaagtgcccgtgcgttgcaataggaagagtatagatcagaaaagtatgcaattaattaaaatataaatttgctgaaatatttggtatttttaagtaagtatgtgtataattaaataaatttacaagtaaagcaagtgtgagaaataaaatataagggttaaatttaattttttaaaattctccatgattagttacgctctttggaattttattggaattttcagagcttaattgctaattttaataatacaaaaatcatttaataattatttaattagaaaaagaaagaaaatccttccttttaagtttggttagaaataaacacattcaatcactataattgtaaatgcttctgaaaaaatgaagtactaaaaatgaacttcttttcttttacttcggcccgagggaccaaaaatagacttatttccagcccttgtcggtcggcccacggccttttgggtcgcgcgggagcacttcccctccccaggccgcaacctgggcttgggcctgaaaagtggcctcgctctcgatccctcttgggcctatttcagcccggacgacgccagccgtctgatctctagggttttgatcagacggccgagcgtcgagatcggggaaacaaaaccccatctctttcctctgccgccgaaaccctagcccatttccttccctcccttctctctcttcgccgccctcccctccgcgcccccgatgctctctccctctctcgaccttacccgagcggcggtggcggcgcccttccccccgaacggcggccttcctcccgcgagcgacgcccttccccccgagcggcggccttcctcccccggccggcggcggcggcacccaccctgaccaccggcggtggatctagcgggaggggaggcagcggtggcgctctctcccaccactgacggtggatctagaaggaggggagccgccggcggccaaccgtccttgcggcggcgacggtggggtgcggcggagacggcggaccgctcccgacaatggcatcggcggcattcgcgctccctcggcgacggccgtccctacggcagcgtcgactgcgacgacggcatgtgcggcgtacgcgggtagatccgtcagcggtggcggcaaccgcgggcggatccggcggcggtggtggcctcttctccctctggcgcagtggtcgcgggtggatctgacggtggtggcgtctactgagggtggatccaggaacggcggcttccttcgccgtctgtcttctccgtccggcgcggttgtggcggccgagggcggatccggcagcatgggagtgaacttctgttatgtatgttgtgattgttgttgttcttggatgatttcgttattgttgttgttcttggatgtggtgtatgttgttgttgttcttcttggatgattgtggttgattttggaggcaaatagtgattgattttttggggggcgacggacaaaatcggactgaaaaaggcagggtggttgattttttttttgggggcgatggacgaaatcggactgaaaaaaaatcacacggatggaccaatcggactgtgatgaccggaaaaataccaatatttatattagttatagatagatatagatttctccagcgagcccgagcactagccgggcagtggatccgctattgggtctactatccaattgctcaccatagttgatattttataactcgagggcactcacactaatatgtccttaaatattaagcagataattttaaaaaaaaccaaaatcaatgaatctgatataataggcatatatcatcttgcaaaatttcaattccaaagtcgattaaaaaataagaagaaaaaaaattaaattcagttatgaatgacaatacaaaactatttgtagctaaattcgcgccgcgagggggggaggggggcaagacgtgtacatttaattaaatttgttgttgtatatttgtggtgagacatacaagacataacattttaatcaatgaacccccttcgacttttcattctgaaattatttgtccaatgagaataagctccttttttttaacttttttagaccagcttttaacgtgttcgactatctcactatgtcttaccagatattgcacttgcacatgatgcacactgccttatcataggcatgcgtcgggtcctccaacatttcaaaggtgctcaacaataatttttctcaatatatgttgcaatttttgtttcttcgatgttctacatattggttgttggtggcgcaatcaattttgttgaatgttgcatctttttaaacatttttctccaagttatgaaacattatttttcaagcaacaaaacattgccctattttttttcttcaaatcggatggatgcccaatttattatttcgtcctagattaggtggcatacattgaattttctacaatggagaagacattttggttacttgttgacacttgggcttgggttcgatagtgagttggagtggattttttcacggcacacagaaacgagataagtcattagaacatgattaattaaacgttaattattacaaacttaaaaaatggtttatttgatttttaaataaacttttatataaaaagtttttgaaaaaatacactatttagtaatttagaaaacgtgctaacggaaaacaatagagttgtcacccctaaactcactgccgaacagggccttagcagttagcactatggtgcattctattagggtgaaaaattggataaaaatttgtccagctgtagataatgagaactgcctcaaaagtgtagcagatttaaaatctactaatgtcggatggcccaacacctactctgattttcaagaaaaaaaattaatcctctctaggatttaccacttttataatatctgtatgaatgagtcgttcaaaaaaataaaatctgtatgaataagaggcattcccttggccaatactacaatagtacagtctgttcttttccgtgcaagtttcgtcctgcaacattcatgcgtttcaccacgcattaagatctatacaaccaactgaaacaggcaagatcagcttggttcagtgatggagatggtggcgttcaagtaagcgatgcactcggtcggcaggctgaggaaggtgttcatgaagacgtcatcaatggggtcgacgacggccacccctaccagcttgcatctcccttcgccgtccatcctttctccagttcctcgtcttatggctccactggactcctcggaggtcagcgttgtgtcgacgaacagcggcggtgctcggtagatgcttccaaccgagaagcagaacctcgacctgaacttcagatcaacctgaaacgagcacgatcattcatgatcgtgattattcttacagcaatgtctctgctctgtttttctccagagattgttcagatgttctgcctgactgcttgcctgaagaaatctagagcacacatgcgcataactgtgacgagacaaccacatggatattacctgaccacttgttggatcgatgtttccgcggagagcctcgggcaagatgtcgatcttgaggaacggcggcagcggcagcccgaggaacttggtcgtcgcgccggacatcgccgggatgtacaggcttgacacgtcgaactcgaccagaaccgtgccactatcctcgccgctgctggcgacgacgccgacgccgcggccgccctgggcgttgtacgcgaagtccgggtacctggagatgcccagccggcacccgtcccgcgtccggaactcgacgctaaacgtgcctgcctgagcctcctgcggcgccgcgatggcagggctggatcgttgttcgccttgcccggtgcacgccaccgagacggcagcgttcttcttgcacgggcgatgcaggtgtctcggtggcgctccgaaagcacacggtttcttgggaattgagggtttttgctgggcccgaaggttcgacgaggtggtgctgatactgccgggcggagtcatttggaggcacgccggcagcacggccacggcggcgatggagaggatcagcagccggcgccggctgccggtttgaaggaggctgtgatttgtgtggctgtgccggtgtgcgatgggccacgacccacgatagacttatccatttcattttttggtttccattttttttctctttttctggatatgccctgaattcatcatttggttgatgaaattttttcatgaatcggagtgtcagaagcttgagtgttagatctgtctttgctgcatgctcaaacattttgtgccgactaagagccggggaataacaaatttaagttgacctataacacgtatttctttttgtttgatgcgaaacccgtatggtcaaagtagagaagtatatctattgactcgaactggagtacactcgtcatgcttagcacagagctgaaattccaagacttggtttgttttggatttggctaaggtcaaacatgagcgattcaacagtccaagccaatgatgcttagctggtcttttcggccgtccaacgctgcaagtcttcaaagccatacacacttgcatacacaagttgaagacttggaactcttgaattggctgctctatactactgggcgaaattagctgggccggttttgagcatcccacatagtttaggcctggttttatgcttgggactatttaaggtggaaatgcagctggtagaaatgcagtttgtgtgagtttgaagaagctagaaaaaccagtgactggcttctaatctattttctactattctatagttattacaagtttctcataatctggatgggacactttttttttttttttgagaattggacgggacactcttccaaacatacccttaaggttgttgctgcctgctgacgtgaaccgaacaaggtaagttttttcttgaggcccatcaagtgaaatgtctccttctcaaatagaccattctgaaagttcagcccaaaggactgcaatacgctgtgaataagttcattttggtcccttaacttgatagcaagttcgatttaaatccctgaaccgcagtaccagatacattgggtccctcaatgtcaaaaccagtgcaaataaaatcccaagatggtttggatgacggtctcggttgacatggcacctaggtggctagtttgacttagtccttgtcttacatgacggtaatgtgacactggaagaaaaatataaaaatttaaaatcaaaacaaaatgtggggcccacatgccaatcagacaaaagataaaaactagtgggaccttgtcaatgagtcccaccctctatctccgcggacaatggcgcgtcgttgcctccttctccttcttccctcctctcttctcgagttctcttgccggctagctactgccgtcaacgaccatagcaacgagagacattattgtcggcatcccaacgacgagatccatttgaggtagtgctcccgagggccagccaccgctccaaccgccaccgccactgccaccgccaccaatgcatgagggagagaggaagatggctgcgacgacaaggaggaaggctgcgacgacgagggattcgtgctccgaggcccagctgtggcggatccgctctccttaccatcactgtcaccttccctagacacaaccgccatcgttgagccgccgccaccgtcaccttcctgagctgcacccgccgtcgctaagatggatttgtagtgggagaaggcggggaggggggggagagaagggcagcggggcacggttgtggatggatggatttgtgccgataggaggtggagatgtgggcggtggaggcggctttcggatggtcagggtcgtgaagggtggaggatgacgagcaggagggatgcgtgaagaggggcttcttggccgactccggcgatttcttccgctgcatcaacacccgtttcgctggcactgcatccactgcacttcacaccttctcctccgatgtctcttctccatcccaccagtgttgactcttgcggctgacatgcgaggctcacatgggtcccccctgtctcagccggttgacaagtgggtcccacatggaccccatcttttttaaaattatttttttatgtaattgatatgtgggccccacatgttttactttttcctggatcaaagtgcgacgtaagcgccacgtcaatcccacataagacgaagacctagtaaaaaaggccacgtaggcaccacgtcagctaaagcccagggataatactcctgagggacctcatttacactggtttgtaagttagggacctgttgtatctgattttttggttgaaggacgaaattcggattcgttgtcaagttaaggggcctcaaatgaacttattcccgtcagaagccacatatataggccgcgtcctcacgcggtacgggccatgtagaactagaacccatctcagctcacccgcagtcgcgcgaccctgggaaaaaagggccacccatcagtgccttctcctctcctctctcttctcttctctctctccgatccggatcttcctacccactccggcgagccctcgccgcgtcgcctccacgcgactcgctcccgtatatcggcgcttcccttagccgctgccgccgcccgcctataccaccagctatatccgattgcctcctccccctttcgcgcctctgtcccgcgccccaccaaaccctaggcgcgccgcccatggacatagagaccgacggtcgcttcggcaacaagcgcgtgcaccaccgcctcggcccggccaacggcgccgcctcctcgtccacctccgggaaggtctgcatccactggcgcgccggccgatgcaatcgcttcccctgcccttacctccacagcgagctccccgaggcgacagccaagcgcccgagccaaagcggcggcggcgggaacgtctggaggaatccccactcaggaggtggagggggccgcggcgccggcggcgccgggggcccgaacaaatgggggaggggccccggaggtgcggatggtggcccgaggcacaaggtgcccgatcggccctgcaggtacttcctcgccggcgactgcagctacggggagaagtgccgataccctcactcctactccatgagcgatagcatcacgatgcttactccgctccagggccacgagaaggtgctcgcttcccagatcaatgcgctcgtctggtaaaaaaagaaaaaaaacctagcattctaactccaattgttgtgtattccatcaggttgtgacagggattgcactgccggctgggtcagacaagctgtattctgggagtaaggacggaactgtgcgcatgtgggattgccaaactgggcaggtagctgaggcatcattgaaatgtacccttcagaggctcttctgttctgtgtgacattactttatactatctgctatatggtcctgtgttagtgtgctggtgtcatcaatatgggacgtgagatcgggtgcatgatcagtgaggggccatggttatttgttgggattccagatgctgtgaaggtagggcgattagacctgagatttgtgactttgcttcagcactattggtgtaatggtgttcatgtgtgtgtctatctgcctgatctattggtacttggtataggtttggaatatgcaaacacaagcggaaatgaaccttactgggccaacggggcaagtctatgcactcgctgttggaaatgagctactctttgccgcaacacaagtaaacttcacattcattttgcttacgtttggtcctaacatttttattgtcgaatcattcactcgtgatgcccttggtgcaggatggacggattttggcctggagattcagcgctgcaacaaatggttttgaaccagctgcctctcttgttgggcaccagcttgctgtcgtttcattagtagtaggagccatgaggctttactctgcttcaatggacaaaacaattagagtaaggagaacttttgactcttggttcacacctattcatgtttactcttaaacagatacacttgctgttggaagctctgttgcatatataaacttccccacttaattgcatccatctgttatgtttccaattgttgaagttcacagtgtataattttgcattatcaatagatcttttatactgtgcatatacacttctagctttctctaataaatttaaatagtacatattgctaattgatttatcttcgggcaacaagcatacataagtaagttgtttcttatatattttctcagaataaatgcaatcaaagctgaggtacaaatctgcacctggtttaggctactacaggcgctgcaagcttgcatcataatttacttaggacatgcacttgcattattctactgttggttgacgtgcacattttgttgtgatatgtcaactggcacgaagaacatttgcaactagtattttggaaattactcatcagcagcactataaatcaccagtaccaagaattgctcctgttataaacttataatacatacaaatggtccctcgtggcatggtcccaatattattgaaaatctctatgttatatttgaatactggaatgttattttcatggtgcgatgattgtaagttttcctagtaattttggtcccttcaatcttaacatagcttgagttacctattctgttttgatgtacatgtattgtcgtatggattcatttttaagggatattatctacttatttccactttccgggaggtatttttgaggtataggttttcttagtgttaatcatggggtatatactcaatcctggttacaagtatggtgaaaatactcgttttgtttatcatcatatatttttctgcatatatgttttctttccattcgattgcacatacgtcgttccataagatgagaatgatgttctattcactttacaaatagtaatgacagaaggcataatatttcaggtgtgggatttggcaacactgcagtgcatacagactctttctgatcatacaggtgttgttatgtctgtattgtgttgggatcaattcctattatcatgttccttggatcaaacaataaaagttagtctctgtccttgactttatgttgtttaataattttgcagatatgtcttcacattccatatcttacccttttcattgcatttcacactcgttcattttgttcctgttcttctaacatcatatctgtaatcacgttttatcctttcagtgcattcatacttctacgctgtgtttctcttcaggtttgggcagctacagaaagtggaagcttggaagtaacatatacacacaaagaggagcatgtatgtgactcgatactcaatactcttaataagcgattgcacaggggttatgttctgttacaccctgatgtactaaatccttattatatttaatttgttcattttcacaaaaacatgttaccctttctggcgaacttctagacagtaccattttatggttttatgtaatgggtgtcatctcccgccctgtttattatggaatataaataatactgatcagtgatcctgtttatactcctttgaacttaccgttaggatttcctttacacttccccatgctaaatgttttacatacagattagcaatttgtctactattaagacagctattactccctccatctcaaaatataactattagagctggaccattgagcgaattggatcagttcactggttttgccagcacttcaacaacaattaaactggcaatttaatcatttcaacatttagatgtttatttgcatgctttatctagcttctatacaagttagtgcccttattacacaagagccgcaagctaccaaagttaatgaaggcactaggcactagttgggccactgaggtgcaatgagcacctagcctgcatgtcatggtatgactggtggcagagccagaagcgtaaaaaaatatttattggagggggctgataatactagttatgatatttcataaaagcaaaaataattagtgtgaattattagaaattgagggaggccgaatccctgcttgccctttcctgtctctgccccctgcgtatgacatcagaacttgatttgtgagttttctaatggctttgcctgccaccctttcctgctacagagccaatatttctgtagtgattcacatagccaatattcatgtagtgatttgcaggatacttcatgtaactgcctaaaatataaatgtgtttacaagcatcatctattagtaaaaatacatgttccttattatttgtaacacaagtaagtctggcgatgtatgccagattgaatgctttaaatggaagttaataaatccaatgaaatctgtacacaggtaaaatgacatgttatacgagtcatgtactataactacactaataccacattggtgtgctggcattttgaattttgaataatcacttctgttccgtcagtactagttccataagagtgtgtcctttcatggtcacacacttttgcctttgagaaaccaatcctttccattattaatatagtatggcatctgccttgcacaaaatttggaaacacgcatgccctttacttctgtcaaatttcttcatttcaatttccaatgctctgatggctttgttttatctgtagggagcacttgccctaagtggcatgcctgatgcacaatcaaaacctgtgctactatgttcactaaatgacaacactgtccgactatatgacctgccatcgtaagaaagttgtcttgctaagattattttgttttacttctgatgtttatctgaagtggctccttttgggtttgtaggttcagtgataggggcaggatattctcaaaacaggaaataagggcaatacaagttggtcctagtggtttattttttactggggatggaactggtgagctgaaggtgtggcaatgggttattgatggatcccagaccaaatgaatatagtgtactctagattagtttcccccctttatttggtgagggataaagaacacatgcataatgatttgagatgtggttggcggccagttctgtccttgcatgtcctaaatttattctccgagggtatgagattcaattggatcgccttgcagttagattacaagctaagtctcaccatggacgagagtttctgtcctggaatgagtttcacgtgagggcaataatttcttgtaatatgtaaagcactggaagtctggaaccaacaagtacatctgatcactgttacgatgtgctggtagttcagaggatgtatcaatataaaggttttgctcggctgcatttgtattaaggaactcaaattttcacagcaatacaattgtttgttgttctctctcggagcacggcattgttttcctcgagggcttttggggaacatatagaatttttcactatgtggtattttgatgactaggatgtacctgatctatagttcttttgaaggaatttagcacggcagatggcagcaagaatagcaacagagttttggatgatggacagttttcacagcaagaatgcaaaatttgaactaaattgtatgccttttgaaagcaatctgcacaggctttaactgtaaggtccatagttgagcttcatcttcctgataggcgaacactgtttgttgagccattgagatttactagatgaatatgcgcggcttgccgcgcccgtcaatgtgtacatagtattaattaaaagtaacttaatgagatacagtagcataaaatcaagtacgtgacacggttagtatcacaaacagggggagtatacatttttttaaaacaatagtaagaataattggttgtttgttacaaagacaacagttagttaaattcgtgaatgataatgcattcagtactgcgatgagtgaaataaagtagattcatgtgataaaagtaaaaaaaaaaaactatctacaataaccttcccaatgtacatactttacatattagattgcaaggcatattacaaaaagtgcttacagaaaggggaagaatgcccacttcaatctgcttacagaaaggggaaggatgcacactccaatctgtttcaacaaactaatggtacaacaatatggcgagtagctgattctctggaaaaaaactgccatagcctccaagatgttgctctaaggggaaaatccccaaaaaatgctatttacattgtattcctgcgcctctccatctgctatgtgttaaattaacacaggttaaactgttgtccgtccaattgatctcccagtgccatcagcacacatgacactggtctattttgcatgtgtgcagcaaggatgagtacgcttcttacaaaacattaaacgatcaatacatggtaaaaatccaaaaaacaaaataagaaaaaaaactgcattgtcagatgcagaagcctgccacaagttagtcaaaagaacagtattactgaaattgtgtgcacagttgttgaacatgtgaaagataggcagtacctcagcgcgtctcaataaagttgctagcacaacaatccattccttaaatttgacagaacacatgtgagcaacaaggaactcaacatcaagccgactttgaagagtatccatttgaagctgtcatcagaatatcaattataaatgagaacagagatccaaggcagataataatatcagcgagattgtgctagtatattgattgatcaggtattgagtgatttactcaagtaagcaccattctatttgttaaacaaacatccataattactaagcttgcccagattcgtaatcttatattatgagcagtcaattcagaacattatcaagctttgtaaaagtacaaactgcaggagaaaactgtagaaaactcgagaaaaataatccaagaccgcaaagtaggtgggagcttctttgtgcgcttgtagtagcggacgaggcggtggatcctgctctcaacaagaataagcctgaaacttgagtccttgtccttcctgttcctctccaaatgcttcctaatagcaacagccttcttgatcaggaagtacaggtcttccaggatcttcggtgcaagacctacccatcaatcaaacaacataaaccagcacacgaacgcatgaagcaatcaatagaagtgggagtgtcatagggtggggagatctcaccgtgggccttgaggatgtgaagaatcttgctactggcgatgctcttgacgagggggattccgtgctggtgacggagcacaacgccaatctgcgacgacatctgacccatcttcgcggccttcatgatcatctcctccacctacaatacgaaccaacccaacggtgtcagaatccgaaaatcccccaaatcgaatcggaagcgagagagagggaggagaaggcacccacattggaggcggcgttcttgagcaagctcgggggaatcctcttgcacggcagcgccgacgacgagatacccttcctgcacaccacaccacagcgcagccgccgccattagaccagagaggagaaaccagcaatacgttagattttttgtagcaaatcatttaatacaataaagctaatgtttaggacagggcatcaaaataaaattataacacatagttatcagtttatcagtagttaaactcagtcatttatcaaaattgtaataaagtatttcataagttaacctattgttcagtaaatcatatagggtaataatcaggacataaagacagtagaaataaatcactgaaggaaatcgatcagtcactatctatttgtattcaagattatatttcaagggttacaattccattatcaatggcgcaggtttttgccatgattatcaaagtataaaaccatataattgttgtattattcaataaatcttatttttaaatccgattttattactgtgtcactaatttcagaaattagataatatcaacattcaaacatatatatatggttctgatcattctagtgtgctactgattccagtatttcagttacttttatatgctagcatatacaaggacttaatcatgttagtgcaacttttttttattatcctttctaatttcagtactgcacttgcatcagaattatgagcattcatttatccattcatagcatataggcatcaactaaataaaatcactacaaccaacagagaccatgagcacaggacatcaccaagttgagtattagcgctagtccataattatccccaatgcatcacagttcacagcacaacatcatacaagagagaacaccacacaaaacatcatcataagaatgatatagggaaggaagagtttactcatcaatggggataggatgtagccgcaggagttctgtggtggttggcaccagtcatctccacgggcagcagcggcaattggagaggcggggcaacggctaggatgagagagagggaggatcaggggaagagagaaaggaagagaagaagagagggagaagcaggggaatagaggaaggaaggggataggaagaagcggaaccagggacaggcagcaccggccatctcggctgcggctgcggcggcatggcagggagtcgagcatccaggaacaattggccaagggaatcagagagtaggaagtagaagagaagattaggggtcgcacccgtagtggaggcctggaaaccttcctagagaccatacctcgccgtagtttggccggcggcggcacctcgtgttgaggaaatcgtgcgttaccacgggctcttggcagtagcggctgccggagggcgaccggagttggaatccagtagccggcgtgaggaagcgcggtggcgttggcgccacaccggccacgatgccgccggagaaggaggcggcgttgacgcggccgccgtgccgtgctccatgccggggaggcgacggtgacatcaccaccactgcaccccactccttgccttccctcgccatccttacttcgcgtggccggcctctccccgctagctctgacgggcggcagtggcgcggtgcccgtgtgcggccggatgcgcagccgccacaagccccattgccggcgggtggggtggggggagaacaagtggggagggaggtgttgcggggaaggcggatgatggtgccgcacccgtcggcctccgccgcttcgtcgtccgaagctatcgcggccatcctactccgtcgtgccgtctcctccggccgccagatccggcggcagcggagctggatccagccgcgggagggccggatctgactacggcggcaccggagacgaggccacgagccgcgccgtcgcacggcctgcaaggagaggcaacggatagcgaggggaggacggacgacgtcggcggcggcgggtggagggcggacgacgacggaggtgactgggggagggcggatggaggcggggggagtcccgcgccggcgccggcgccgagcacggggcgcggggcgtgggtggggcggcggccgcgcggtgggggagtggggaacagcccgtggttagggtctggggtatatgtggtcgtttttcggataaaccccttcgttttttatttttacagagctacccctaaaacggaattttctcttcttcacattgtatatttgtgaaaaacgagggttttttcgcaacaaacacaacggggtgtgaccagtccaaggatgtatacgatatttcgtggaaatacaaggacttttttgcaaaatatccttttaatcaaaccagctccaacccgccgtaaagaccggcgcgtgcgcacgtccccacagcgcccaaaaaaaaactttggactggagcggtcacgaaggcgcgcgcgaggagccgggatgaggaggagcgacgtgtaaatcatcggatagccaaaaaaatttcaaaaatcggagaaaaatagtacggttagaggagttattgattgatgattccagtgatacacctatccacagggaaatatagggaaggaagatgacaataagaaggaatgatagaggaaaggggaaaggattctgatcagaatcacttttagaacccactaatatggttttgtacctatccacagggatggcaataagaaggatcagaatcacttaagagtccaccaataaatccaaaatttcaaaccctaattacaaaataacaataaactgaactcacagcagttgctgggcgtgggctgttgtaggcatctgttagactgttactacaaaggatgcgatattaaatttaagtattctatataagttacatccactaaacatctagtaaatcacagcatgtaaatatagtgattattagagcaggtataatagcagactactccactagccagttacaaatatatctatctattatattattaaaacagttttgaaaggagacaccactttcgctgtgggggctagaaattcccacattaattagagaaaaagagaaaaatctacaccattgaattatgatagatcaataatttaaccattgagattgatcggacagatataagagtccgggtccgattcagactcaagtcccaaccggacaaggctgacaactaacacgatttcagttttttatcagagaagcccgctaaacaaaaaatcaatcctcttgattggcaatcttcccgctacatacagcaatggcacatataattaataatacatccaaatattatataagaagatctagaaattaccaaattaaataagtagtaaaaagaaaaagaaaaaatctgcaccaatttgttttgaacgaacaatctgcaccaattcatggtggacatatgttgtaacggttgacaataattgcccagaaataagtaccgggcaaatcctactcacaagctgtaaaaatactaaaaaattataaaagtacccgagaacaaaaacaagaatctatctatgcgacgctctttttttaaatagtatttggtcatttttaaaaaaatccacattaattgtattaagtatgaatataatttataaataactgaaatttaagataaaaaataaaataaatacgaaattataaaaagaaaaataaaagttcaaatatgaataaatttataatagctgaaatctgaaataaaaattatcacattaattggaggaaaaaatagagttaaagtaggaatacaattttttaaaataactaaaattcaaaataaaaataagcaaatatttaactaacagtctatctagggcataacatgagattaattaaattcgaaatgaaaaataaaataaaattcaaattagaaaaacaataaaaattcaagtatctaaagaaagcccatgttccctcgatgaagttcaattgctttgacgagtgagtctgatataaagaattgacaagcggattatacgtatgtaaacagccttcccgcctggcttgaatgaggagtggaaggacccgacctctagcactttacttttactgcctgcgcggctaaggaaagacaactacacttccaagtcctaagagaatactagtatacgattgttatataaataggtaaatgttcctttccattatgaatcgcgattgtatggccaaccaaataccattaaaaataactagaattagaaagaaaactaccatatagaataaaataaaaaaaatgaattctatcgtattactattaagcagggttttaaatctcccgctatagctatttgagatatttgctcttatatacaatttagccgctatagctctatttagcccgctatagctgtcgctatagttatttgagaagctaatcgctaaatgtcttagcctgctatttaaaacattgctattaagaggacaagacgagggtggcaaaggaactgggcaatgacggctagcgagacttctacaaactataaaaagaaaaccaaagaatgattaggttatatttttaaaatccaaataatcaagggttctaataggaatagaatttataaataattaaaattcgaaatagaaaataaagcatattgaaagaatagtccagatagggtagaacacaagattaattaaataaatctaatgataatcacgtttgattttaaatctcaatgacactaaatagggggggcagcgagcgagccgtagaatacagtgccaaagtcgatgattgtttggcgggacttctagaaagaaaaaaaataaacccaaatgatgattattgatttttaaaaacaaataactataaatagaggagacattggacgggctatagaggagtataatggaagcgtttgacgggacttctgaaaattataaaaatgaaactcattgagacaacaaactataaaaactacgatgtccaatttttaaaggttcgagacttctaaaaagtaaggaagaataatgataatcatgtttgattttatatctcaataacaataaagaggggaggcagcaggtgagccgtacgggacttctgaaaaataaaaaaaaagaacccaaacgatgattatattcgatttataaaatcccaacgacaataaagagaggaggtagcgaacgaaccgtagacgagtatagtggcagcgtttgatgagacttccaaaaattataaaagcaaaacccaacgagacaataaactcaaaaaactataaggcccaattttaaaggttccaaggagaatgaataaaaacagtggtaaattaagcaagcaaataaaaaaggggtaacatcagtaaggagtagcaactggtgtgacttttataatctataaaagtagaaacaatgggttgataaggtttgaccttttaaagtcttaagacaactagatagttatttaataaatataaagtaaaatcatattaaaaaataaatattttgtatgggtgctagccgcgcaattgcgcaggccaccctgctagttttaatgagataaaagatgagagagaagagcagcggactacagatctatagctagctgcagcacggacttcaagacgcaatgtgtgtatgataagttggaccatatactaatagtatagtaagcaattattgtataaattggctattagattggttatagatgtattgaagctagcagtgtgctatactattaaacttgctcttaaagccgtctgctgcacaaccagcgcggcaccgatttttttaaatatgagcaaaacaaaaaaatatatttttttatgtaaacactgaggtattggatttttattcataagcaggacaacgtaattctgcatcatcccattaaaacaatcggacgccaccgatctagagcgtccggccttctcacggacgcgatattctcattgcgtccatagcccacgggccaaagggctctaaaaacagtatccctgttcttctgcatcctatcaccgtaaaatccccaatctgaaaacccacgagtaaaccagcggccacaaaccttagcggcgtggcggcggtggcggcggcggtacccatcccgttatttttcttgatcgagtcttaaggtatcgagcttgccgtcgtcgtcagttctaagtacgcacccacgcgactggctctcagccatcaggttagtcgtcttacacggccatgtattagttaattgcatgatgagctcttttggttttttcattggagactaaatcgttgtgcggcattctctttctttagtgatacattatagtgctgctgcattaagcattagttgttaatttttgtgcttatctttataagacaatgacagattagttattagcaaatagcaacaggcatcctaccttcctaacaagctttgtaagctagtttccgtcaacataacaatgcgactataaggaaacaaaagggtgcaaataatctagaaattagttttacttttgatcaatcatcttacgatgcttgtttataagttcctgaaaaagaaatcagttgtacgttgtttgacatgcttccttaattttttgtatgctacaaactagtaagatgaggactaatcaagatgggttaggtcggtcaattacaataagtgatgaggagataggcttactggatggagatcaaactttagttcagcaaactgaactaaatgtttcagaacgtttcagtgccttactatggatgcctcattgccagcacaaaatctcaaaagtttggaaaaatgtaagctattgctagcttctgtcatatacctttccaaaaaaaatgattggactaatttgtatcctacgtatgcaggctaatgatggtgttagtgtcaggtatcaccacgtgggcattccataccattatttatgtgaaccactgtcacgcccagaaatttaacccaaatttccagactattttgcgtattaaatccctgtccaggaccagccagggtacacaaaacgacaagtaatatacagttccaaacgtaaataaagcgtaaaatacttacggaagaggcacttagtcctcacaccgaaatagaacgacagcagcggaaaaaggcgatcctagcggggcttcagctccactccacaggcaaaactcaactggggtctgagccttggtcctctaactccatcttcagctcagaagcactacacttctgaaaagggggaataatagcaagactgagtacaaccaccatactcagcaagccacaccaacgatgcagatgtgcaaggggatacaaggatggtttgtggctatttgcataaaggcggttgtaaaacattttattgagcaaaacagtaaaactgttgagtaattaaagtaacattaaatctccactgatcaacgctacaccacgttgaacaggcccaaccaacccacctgaactacagtgtattgggtcgatttattaagatgggactaatcacggtgaatctggtcgaccgcccataaccgtgggctcggctattcgaatagttttactctgatcagaggtgtacaactgtacccacaagacacagccccacgacacgtttccgtgcgccgacatgccaccacgacataccggaaagaggccgtgacaggacccttcgcataaccccctctaaccgatcgcaccacaccttagggttcgcccccgtccccagcaggcaacgggcagcccccctttcgtgccgcggtgaatccggaagccgatcaaccggacaccccggccgacctaactccatcacgcccaccctcgcctgggtacgtcggctagagaaaagctacactacaagcccagccgttgcccacgctggcttgtggtaagtacgataagttcttccagggcatcccgcgaaccggtccttaattgccatggggtgcgactagcaaaatcatgcacccacagcccaccatgtagtcgcattttagttggataattatgaccatgaagcatggccaggtgtctcgagcacgcagctcattctgctactaaaaaggtctaatattgtaattatcccatcaactgagctagtgttatttaagcagggctaagcatatagttctagctaggtcacataagtaacatgagctagtcaatttattacccacggttgacaaagggcagatatcaagtaaacatggcacaagcgagcagataggtaatacctgaatcccatgtaattaacaaaacatgcatatttatttgtaaacggtaaaacatttataaattaggatcaacatgctcaaggggaatgtgtgacttgccttgcttcttcaaacaatcttacaaactcttatccttgcgaccgcgaacttccgaaacgacggattctacacgctggcacgcaaaacgaggaaaaaatctaataaagaccaagcaaacagtacataaaaagtaaacaaacatgtagagctcaattttagatgaattttgcaagttgaacggctcaattcggagttcgaatgaattagatatgaattttagaagttttgagccatttaaatgaatttctataattattcacgaattattgcgcaattattatttattttctcaaaggaaaaggctgtgctgacttcagcaaagggccggcgccgacaggcgggccccactcgtcagtggcacaaggggcaagcacacggtggactcgatccaccgcggccgaggcggcaccgtggacccggaccacggaagtggtccacgggaccgacggcctggatcggcccaaagccgatccaacggccacggccggcgcggctggggcaaggcacggctcaaagccggcaggccaaacgacggcgcgcggcggcgcggccacccgcggcgatggccggcgacagctcacgcgggcgaaagcggcgcacgcgagagagcagcagcgcggcgcggcaagggggaggtggcaaccggctgcccggcaccatcggcaacggcgcgggcacgtagcgcggagcgcggcggcagcgacccggtcggatggccaccggcggcggcagcgcgtcgcgaggacgcccgggaggcggccgacgaaggggaggaaaagggagagggaggggagtgctcaccgagatgcacgacggcgaaggggcggccgacggcaaggaacggtggcggcggggctcctcaggaagacgacgcgacggagctccggcgacgggcgtcgctcgggatggggcggacgggctcggcctcgatcggccaccgaggaaggaggagctccgatggatttccggcgaagaggggtggcagccgaggtcctcctcgtccttgcggagctgagggaggcaacggcgcgggtcggcgtcgaccgaagcggcggcgcgacgcggctggagtcggcggcggcggagagaggtggttcgcgtggctacggcgctacggaggtggagaggggaaatggagcggtggccgagcttgcccgggcggcggcaaagctggcggtggcggcggcgcagcgcggagacggaggcggcggctgaggcacgcggctggagaacgccggcgagcggcggcgatggggaccggcgtggggagagcggggaaaagcgcagggagctcggggtggagtgggaaacgaaagaggggagcacgagggtgctttatatagggctcggggatggagatcgtgcccgggagaggcgggatcggccggcgacgtggggaggcgaagtggagctcgggatggcaacggttttcgcggggcgtgggggaaacggcgcggacgtgggcggtgaccgcgcccacgcatgcgcgggagagggaaccgcgcgaggaaggcggcgacgtggggagcacggggcggccatggcggcggttgtgcccggcgtgaggaaggggatgggcctgacaagtgggtcccgtggtcccacttgtcggcctaagggagagagaaagggcgaggggggaggttatgtagatttttcaagggagagagcgagcgggccgagcggatgggaggcaggaggccggcccagatagagagaagaggggagggggattcggccgggcccaagggggggaggggagggattttatttgtttttcatttaatttaattggtttaaatgaactttgtattattataattacttcttgagctccgaaaattcgcgggaaatttcagagagtattttagggcacaaagaatactacaaaatattcccggccaatgatttttaaagggaaaattttaattctcccaataattcacttggataaattgcttaactttttatttaatttctaggaaatgcattattaaatgatttttaattctgaacgaaaatcggggcgttacaaccactactgaagagacttggattctatcaagtttcccagatggttgggatgagtgttgatagatttctaattggagcattagtagagagatggcagcctgagactaacacatttcacttaccagttggagagatgacaattagcctacaagatgtgagttgtctatggggcttaccaattcaatgtgagcctattataggcaagtcagaggggccatgggttgatgaaattgagacattactaggagttactccaggaaaacaagtgatgaagcaaaaaaagcgaaaggcggacggtgacttggaaagcgggggaaagatgacatcttctaactactccatcagcttaaagaaattatgagatcagttcaaggagatgccagaaaatgcaacaaaagaacaaattgaacattacaccagggcattcattttggatattcttgggtcaatgattttcccggatacattaggagatggagtgactgcaatgtacctgcaattccttcaggatcttgataaaccaaaggagtacaactggggggcagcaactcttgctgtgctttatagacaattaagcttcggtgcagaatgagagagattggagatggctggtccattagtgcttctgcagcattggtgtgggtcgcggttgagaccaggacgaccagtggatcaagataggaaccctattagttggggagagccagaccctgagagttgtcctacatttggagcaaaatggtgtggccaggaactttatcctctgccacataactcgggtgttgcgttttatcggaacttgctggatcaagttcaagacaatgaggtctcttgggaatcatataatggactattgatgtccatgccaagaagagttagagctgaacgtgctttctggtatagtcgagtacctctcatccatttttggatcattgaatttcattatccagatagagtgatgagacaactagggagaaagcaaaccattccacctcctcccccacatgatgagagcaagcttcgtcaactccataaaataaatcatacagggaaaccacgtgattggaggaagctccacgcagaatatgttaaccaatacaatagagtttggcaaagcatggttgatgaggagcaacattttgaccaggcaagttttgccacaatatcgtcattggtttcaacagtatgggatgtacactgttttttggatgcttggtccgctcaaggtttgcgggatcccatcccttatccactggataacttcgattggaccggttacatgcccagtggtccacctctctcccgattggtatactaacatttctttacttgttcttttttacttgcaataattcacttaataacacttcttttttcttaaaatgctaatttaggctctacgttctatcaaacaagttgcgtggggaattaaatgtgctatgagcagaggatggagaaagatgggcaagattcttatctgtacatgttacaataacgtccaggatatcaatatggaggctaagttaagcagcatgctaagcgagtcaggtctacctttatgtgtagatgacattcgatctgatgatagtgcatcaccattttctacccctaaaccaattaaacctgaggagataaacatggatgtgatggatgactggttgtactcaaacaggggatttacaagataccttagtttaggtacatattctgatgtgctggaatctcaggataaacattgagcatagatcagggcaaagagctttttgttactcctgctgttagacaatgttattatttggttgatcaaagcttgtgattttctttgtttatctgtaagttctataaattagaatctattttttttacatacatatggtttaacctgtatcttgtatttcctgttcaacgtatcaaaaaaaaaaacctcctgccatttccattcaaatcacattgagcgaaataagacaagcagtgttgtccttgtcaagatacaaaaataacaagtaattgtcaatagggaactttaaaaatatcatgcttgttaaatgagaatgaagtccttactcacagaaaactaaatccaaattttataatataagctagaagtagatttgctagataaatttctagggcgatgcagcggagtccatcctatggattgtatcacccttgatgttggtgagatggcacccctgcagtgttaattctatattagtaggaagcatagatatatcgtacaataattaaattatgacagaccggcttgatttttatcttgggttgaatgacgtgcttgatgtcctaagcgtcgaccttgcatttcatccatatacattggaattcggttatatcttcgtcgacccaactgtatcaacctagcatcaggctcaataattggccactccgattgatttccatatgggtggaactgaccagcccaagtgtttgcgagtgttgtagaagagtagtaaggatggataaactaattctcattaaggtttctatctttgcaaacagcaagcacatgagcacaaggaatactagtaaggttgggcttttggcactcacatgtcggaatagcattgttgcacataactagcttatacttgaaatccccttgaacatacacaacacgatctccttgatgcaatgcaactcgttcacggtcaaccttcacctcatattctcctctttcatcaccatatgatataacatgcatggatccggccttggcccctcgtttcactaataacttctcaacccgtcgagaccacattttccctgagtttgcaagatcaagagaagatcttcttctatcaacaaaccattctaagcacttgttaaatgtttcctccactattgccatgactggtaatctccttgagtacttgaacacattatttagagactcggagccattacttgtcattatccctcatcgatgtccaccatccatgcactggaaaaccttttcagatttttccggctcattcttatcttcttgccgatattttcccaccttaccaagataagcaattgcatctggacaagtttttgaaatagcttccataccttcattgaatctacgtggtttcttcttcttgacaacccacttaaaagtttttaccacatcatcatctttacattgcttgtaaagattctcagcaatatgttgtgaacaaaatcgatgcacacactcaccatcactttcattccatccaatatgtggctgcttgaacacccatttgatagctttgtggcgatcagaaataacacacacaaatttaccaaaaccaataacctctttccgcaaccatctcatgaaccattcccaattatcactgtcttccttctccactattgcaaatgcaagaggtaataatttgttttcagcatcatatccacatgctatcaacaacctacctcggtatcttccatacaaaaaggaagcatctatactaatgacaggtcgaagataaggtactgcttcaatacaaggtccaaaagcccaagccacgcacttgaatgctcgatgcccttcacgagtcatcggttgtgacaaaatttgatatcttgttccaggattagttgctttaatagcctccaataatggagtgagcagtgcatatgatccttcccaacttccgaaaagttgagcaattactaacttccggccacgccataacttgttgtagtgtggctttacatttttataccgttgccgaactaattgccatatgttcattatgctcaactccaagttctctttcaagtcatcacgtataacatctgcaataactgcagatgtcaattgtgcatgatcaagtcgatcagcgggagctcgacatgtgtgaggataggggcaagtctgtatcttccaacttgaaccaatttttgttggtttcccatatagcttccacaagcaagtattgtctatgcacttcatacttagtcttgacttgttacttgtggtaacctttacttcttgattggtactaatgtgaaattcattaatagcaaactgcaaatgctccttggaatcaaaagttcggcctttagctaatggactgttaaaatgtttcctcgaaccaaagaatctctcatcggccgttgtattctgtagcacagatatatcatggaaggcacttacagggtgcttgtcagacctgcccacgagtggcaacaatttgatcaatttgaccacaggctgaccataggtgttatcattcacatcctcttcggcttcgccatcgctctcatcctcctcaatcatatcaccctcacgttctgtctcttcatccacatagccatcatcttgagaattttcttgcgcttcatttatgatattatcagaagacaagcccacaattggtgcataattactcacatcatgaattttaggagatataccatgcttaggcgactgatgtgatgctgacacaatattctcagcaactgtagccatagttggttctaggttttctcttgttatttcactaacaatgtggttttggctgaatccactatttgttggagtgaactcaatgtataattccaccatacgccaactgttccgtgctgatgtcatgtcaaaaatcatttgccatgatctggtctcatataatgggatcaactggaaaaaatatggccctggtgctcctacatcatatcggccttgtataacaagtgaatattcagtttcagaatattttagccctccataaatctcattctttacatcttcgaaagttgtagcttcggaagcaggaaaagtaatcttgggtggaatgctatactctgcaccagtcgctccatatacaatttcacgtccagtgtatacaagaacaattatcatggtctgatgacctaatagtaataaagaaaagaaaaatatatatcaatttccatattcgatttattcatgatcagaatatttagtatatacatggcacaaagcactactaacgtggagcacatagctaatgatgatataatcgtttcatgcagtaatttactcatactttcgattagcagtgccgcaacctttccaggatagaagaataaaatgatacaacagatctgctagttttttttagggggaaaaactgatatattactcagctacggcctcattcacaaaatgtgagatgagattacaagaaccatctggctagaactcggagagatatgctacttgactagtactaatgtctaatcaattccaaacaacgaaaagtaaacataccttgcaaataatcttacgcgtgatctctgcttaaactctgatctcatctgatataagactagggcatgacttctgcagtaagggaaggttagggatagaaagaaagacactaaccaatgcgtatatccgtatttcttttctacgttgcgggcgtgcagttgctcggcggaggccgctgttaagttttggcgtccaggttctgtccagggacgcagtaaaaaccttgcgtccaaattagtcgcagccaaatgatagcgtccctatcaaacagatggacgctacttgaccagaacgtcctgcttattaatagaattagatggttgtggtgcttacataaaaaaatatatttcttattttgctcagaattaaaaaaatcggagcgcggcagctcggcaacccaagcccacctcagctgtgccacgcgcagacatctcgccacacagcagccagaatcgctggcagccaacgattccctccactgtggtctccgtgccatactcgcgatttgcaggtgatggcacaccattattagcttatgattggaggatcatagagtggcagcagctgattctagagagggccaggatctgcttcagccctgctcgcaaatcttgtgtggggtgtggggaaaaagtttggaaaggaaccgcaacggtaggagaaaaaggcggtccggcgatcattgtatgtaatgacgataaaattgatgatgatgaatgctcactcccttctaaatcaatgcaactttacattttgtccttacatcgtgtgtctcacaagccacatcggctcccaactgggagagatgtcgtggcgaaaaatcaagcgtgactcgtgataggaatactccagttctgaaaaaaaatcgtgataggaatcgccaccaacgagcaagttgaccacttcctaactctgtctaggcagctagtgttgctagaacagtgatatcgacacaaggccaatcctatcgggcagagtgtgagatgctcgggctttgattatcctaagagcaaaatagtatagccaattgtgagtttataatcaacttaatagtcaattcatacaatagccacctataaacatatatactacattactaatatctagtcctacctatcatacacatgtgcattttggagtccgtattgcagcttgctacaaatctgtagtccgtattcttctctctcatcttttattcttttatttttttaaaatatgtttatagcttgcttatagtatgttaatgtatctgctctaattactggagtagtgctccaatattgcacgggagtatctcaccccaagcacacacacgtagtaactgtgaccgtgtccgtgatacggaccgtacttctgggattccgggcctagtggaagaaaggagtactccatagtatgggcccgtttagttctaaaaacatcatatcgaatctccatatacatatatggagtattaaatataaataaaaagaaaaattaattgcacagttataggggaaatagcaagacgaatcttttgagcctaattagcccgtgattatctataagtgctacagtaacccacatatgctaatgacggtttaattaggctcaaaagattcgtctcgcggtttcccgacgagttctaaaattagtttttttattcgtgtccgaaaacccctttcgacatccagtcaaacgtccgatgtgacacataaaaattttcttttcctcaactaaacacacccaggcgtgagctacggccgaatgctcctcgcgttttaacctttgcgatgattcttccagcactttccaaatccacgacggcgatgttcagaaaggcgagagaatatccgttggtacatgccgtattgcactgcatggagcagcagcagcagccagatttttggagtttttactgttgcgaccatgtgcaccgataccacgagaacacttgtacgtggcaattcgctcatgagcttgggagcgcttcccgtgaaaggtaatactgaggggccaaatgtctgaactagaaactcactattacagaaatatttttttatgcggctagaacatttttttttggaggtagcgaccgtctagtgtttgtaaaagtaataatttgttcgtaggcagacagtataaccacatgtaaaagaagagatttttgcaagcaggcatgttaggccgtcggcctgaaaaaattaaaaaaaaatccaaagccgaccagatacatgcccgagggagaggagttggcgagatctgcacgggaggggagagcgatccgccgccaccgaactccccaccactagatcctccgccgccgagcttcctaccgccggatcccctagtcaccgcccgctcccgctcagcgtcggaggaagtggagaagaggaggtggagcggagaggatgaggagaggagagttggtggaggagcagagaggtggaaaggagaggaagtggaggagaggagatgaagcggagaggatgaggatgatgagagagagggaacttagatatttttctggatcaatattaattattgaaggtaaatggcattatggtctgcctagaaatgggtgggaggctcatctgtaaaaatcgattatgtagtagtggctatggtcaagtatggaaatgaactcaaattggttcgtcttatgcacatatcggctaaattaccgatatatactcctaagtgattaagaaaaaagtaactaatatccaaattacaaatcatagtactggatggaggacggggggcaccatgaatccgtttaggcacaatgaagcttcgcccctggtaacctgtaacccttggtccgaaaacagcttctttaacataaagtcagagagacgtgagtccctaacaggtggacctacacttataggctcacaagtcagcgacacacttccctctaacttacgttaaaggagcctcgtcccccttgcctacttcaattgagagaactaactattaacttttattttatttatttaaatgtaaagttaaattaatctgggtgaactattatagaccaaggatttaggggttcagctacatatttttaggagggtgtttagtaacttggcctagagtttttttttctagctacatatcgtttatttttatcatatatgtatctccttagtctaaactcaagcactcgcatagcctaaactcgatccaatgcaaagtaaagcaaaccagtaatacttcatccatttcattttagctctaccactataaagattatgagatcgaaccacacctatctatatttgtagtagcctacacatattctcatcatacaccatattttataatacttttttcaaaaagatagtggaaaatttcatttaacaatgaaaacattcaacctctacatcaagctaaaaaactagataacacgaccatattatattgccttgtgacaggttacaccactacaactatctaggaagaatctcaaagtctatgaagcactcctcgtaacaacacttctaagaagaattcgtcatttgtctaccgatatcatgttgatcgatttaaagtctgtgatagatttgcattcagagttagctatgagataaaacctcatttgaactggggtggggagagggttgttattatagtcttttttagaaaaaatcttatttttaaaaaggctctataaatgcttatatttgtgaacagatgaaataattatggtgaaaatatttcagatcactcatatctaccacagtagcctttatctaaaaaatatctagagcggtagtgatgttattcacttaacgtatgcaacacaaatgacagtatattgatctggacaatggtaacggatctgccatgggagcggtaggggctcgagaccctcactggtggagaaacctttttactcccgattggtaaccctccttagtcccggatttccaaccggaagtaggaatctgggactaaagatatccatctttaatccggttgaaataaccgggactaaagatccatctttagtcccggttgataacaacaattagtcccggttgttgttatcaaccgggactaaatagagggtagcgggcagtccagatagtccctttttttttctccttaatcaagtggcatgcacatcctgaaatcaaaccccaaatcaaagtaacatcacaaatcttaaagttactcatacacacaaatcaaatacatcacaaatcctaaaaaaaatacaaaacaaatctaatatatcacagattatacatttcagatctatacaaatgtacaatgaataataaaattatacatctcaatgaatcacatattatatacataaaaagaaaacaaagccggctgcctccgctcgccacggccgacgcctacggccccgttggccgccggccgcctgcccgccgccgctgggcgcggcccttccagccgccgccacgcgcggccacctcggccccaggccgcctgctcggcgccgcccggcacggccaccgtctgtctgctcgccgccgtcgggcacgccccccccccccccggccacaggccgcctgctcggcgccgcctggcacgaccaccgcccgcctgcccgccgccaccgggcccgcccccccggccacaggccacctgctcggcgctggccacctgtcggccgccggatgggaggggaggagggggagtagaggggaggaggaggcttggatcggatctgagggagttagagaggggcgattgataacagtaaaatttggtaatcggcaaagacgtcatcggcttagaatcattatcggctgcagcatctcgaaatcagccaatgggagttatcaagtcgccaatagtcgggttcctactatattcggttaaggaaatcaatctactaaaggaagcttatccctaagtgaccgagtttaaagagaatgtggcatggcagtttatctattaattaggaatagtttgttagtttccttttatctttaggttagtttctttcttatccgacaaggacttgtatcaacccatgggtataaatatgtacacccggggtctatgtaatctatctccacgatcaatacaattcggtgcatcgccaccttttaccttttctactttattttacgttccggcagaacttggcacccgacgcggggctgcatcgtcttcgatctccggcgaagggataagtctaatgttccgccggcccaggcaattgtatcgtttacgtcggcgtcgttcaaggctacatcagtacattcgacctcttggattgctctggtttggatgatatacttgcctacctatttatcatatgtctctgttaatctaatcttagcatatcaatttagctctattggctgcttctcgttttagggtttctgtcggtatcggttaaatcgcgttgctagattagattagcttagacatctaccaccctgaaaactcagtcaatggcttgattgtctagatattatgtttcttttcatacttagtgctgcatcagttaagtttgatctactaagtcgtgcttagaaccataatctctagcctgcttcttgattgccaataagggtttcatcggggttttagccggtgagttatctggacgttgcatcggctcataaggattgcatatacatataagttggatttagccgatgacaacaaaggcttcactgtttaatctaatcttgtggatttcatgacatcagacctccagccgatgtgtgctttgaccttcggatcgatgcttatttatcatatcattatttgctgattggtttatactggaatatattgttatttcattacatggtcatcagccgattgcctttatatcattatctacattggacatatagccgattgcttaaccctatcgctatcggctggtattagcatcggctattatcggctatcggctggaactacaccatcggcttgtcagccgatttgctgttttgatctactatttgcatatcttgtcagttgcaggattaaactgactggcacgcccgtatctcattaatctttggacctgcacaggagctaagcagatctcccaggtcggtgtgttcgattttttcatcaacagcgatatccgaggggggttggagagggacgatcttatctctaaatatttcgtctgagacttaatctatcagagatgggagagaaatatttactcccagttggagttaccaactgggactaaaaaaacattttagtcctggtttgtagtaccaaccgggactaaaaacaatctttagtcttggtttttattagaatgagactattgtgaaaatcagccgacccagcaaagatcatttctccagtagtacccagtgctgagactatgagagtccccatcaagtctccaaatttttctgcatatattcataaaaagatgggcggcatttttgtgtagtttgttcaaccacccctactatttctaaattttctactatttcttttttattcttcccgtgggcaagaacttttttagtttaaaaatgatgcgtgagctcaatatatttcttcataaccatatgttggaatacaacgtagtactacttcatagcaatttgataatctttagtgatctggcacagaatatgagattattgctggctggataacaaggaacaaggtcgattcgccacattcagaaaatatgagaggacagcacaaaaagtattctgttcttaaagacagaaggtgcagacaagtaagcgatgtccacttatatcatgcctagaatttgattgaacacactattttagtggtagtgggtgaattactttgtggaccctgccatcatcgtctatatatcaataacagccgaagaaaagtagtgtgaagcattagccttttggattaaggtgagcattcgttttggattattatagccttttgctttagtatttgggtaccaagttttgtataaaaaaatgataattcttgagatttttttacggatgataaaattaccctttacttaaccactgatatttttccatggagaaacaaactacgaaaacagagtaaacgaatgagagtatccctttaaattttagaaatttattttactgttaattgtgggtgtttcattgttttctaattctcggcaagccaccctagctttgaaccgctaaaagtaaaagtataaaagtcttattttaaaattaaattacttttagttgttttgtttatttttcttggctcgtagctaagccatagctttattggatcactgtccactatatttattccatatcgaaaaactattttaaaagattttagtagtggtgtccgttctaatattctaccactaccacacatgattcgttcgatcgtgtaccaacgttgagatggagacttagcactgtcatggtcgtgtcacccaaatttatattgtttaagggttggagtgagccaatctgcgaagcttcaaaggatgaatgtgtacaatataactatttataactgtcataggattacttatagtcactttgctagctattgaaaaaaagctaaagaagaattcctatgtcctttgtttagtaagggaaaattggaaccaagacattataattttgtaaaatttgagatatgccatcctgaccaacatgtcattgactcatgtaggtcctacatgtcattgatatatcgatggcatattttaaactttgcaaaattataatggcatggttccaaatcttgtttttttagtctgccgtaacttctgtacctaacacactgtctccagagaatggtgttgatattcacgtggagtttttgagccatcaacatggcgcctatcatatgcagaagtccttgcctctttccaaaataaaatgcataagtactccataaaccaaccagcgtgtgcggaccatttgttctttgctctgaagctttctgtaaatctgtaatatattggcagcacaaaatgaaataacgtgtttattttgaacgcgagacaataaatttgcacttgagccgctgtctcgctgagaccatgcacgattataacatgttagacttaatatactccactaatcaatcaaccaacaatgcacaaagtgtttctgagatattttagaatgcttggtggtatcaaccaataccatattgtagcacgttaaccacacctttggagattcttcagacaaatatcatctattacacctttagcttcatgaccagcaaggcagcaagtgacctcgattagaaatggaagaggtcgcggtctcgatgtgatcgtttggattctccattaccgaaagccgacgagacttttgagtaggtatcttgaatattctctggtttattccgtaagaactgaccgagtgacagtgtgacacctaaacattactcccttcgtcccataatattttaacctaggatcggacaaaacatttcataggacaaatttgtccagatttattgtcctataaaatgtctcgtacggtcctagattgctatattatgggacgaagggagtaccttgcatttctatccgaaaggtacatcacctgtgaactactgtttgaagttgtggtggaaacgagcaaatgatggaaatttgaagcaagttggaacagacgtcctaacacaattcgtgcatgagaatactcccaagcactaaaaagtttgcagctttgatcacaggattgacggagttgatactgctgcagaattgaccaatttatactgagaaattctatgttttacgtactactgacaaatattttgttctacaaaatggcgtcaatgaagacgagtgccattgccatcatttttagtgcccttatggctccttttattttcttcgttctgtcaaaaaatatcgatttgaatgtgatgcccacaggcaaatttcgtctagtaattttactggaatgtgctaatctcgtgcatagaatttggttgtgattaatctttcttatataaaaatatatatactcaatcaaaaaaataaaaaaagaacgctataaatcatcttataattagatttctgacttttaatttaatttggatgtggatgggaataacgccaatttaaagtcatcaaacaaaagcaacctgattatgatatgaggctgtatctatttattgccttaaaaaacaacctggaggggtagagcatgaacatgagtttttggactatttgttcatcagttgcctaaaattttctaatacatcaatcactttttaaaggcatatagtacgccaagatatgtgcacactatataacaaataaccatttccccttctccctcctcctgattcagtccattacctatagcgcttgaactgatggcgagacaagggcctcaccttatttcatattgcgcttgttgcctctatcctactcattggcgacgaggcaatgcctactctgtgcaactcctccctccctctcttcctcctcatcatactctcttgtcttgctaccattacctctctttgtcaagtccagtggaattccctgctccaccactcctcccctgtctctgatggttcgtgccaccaatatctattactgttgccaccgtcgcctaacctcatgacctattctttacccccattgccgtcattcactcatgcgactttggtagcacatcattgcctcgttgtttgctcgtctacggtgcccaccactggtcttctgggtcttccctctaaacccgccctcagtgacccctacccagttcatctcaccaccacccatccctctcatcactattaggcaggtatttcctgtcatcgttacggataagacataccttctatcctacgacttatgaaatatacgcatacgacatactttcgtatgtgtgatagatttctgtatacgataaggaaatcaacaagagattatagaaataatccccacaggcaagtacataacagagttctactcggagaaggttaggatcatactatatcgtgcagggtccgaggtatccgagttctacttggagactaaggggattcactgtataaatacataccccctgaggaatctagggtatcgaatcatagcaccagccaatccgccactacaaaagcaatccgaattacttgaagcctacttgccggtagatctcgtcgagactctctcaacaaggatctcgccggtaacctcggaatcagttgttctctattgtattctgtggatttccatatctcatataaattggattagggctattaccttgcgaggggcctgaaccagtataatccttgccatatctcatataatctggattagggctattaccttgcaaggagcctgaaccagtataatccttgcctctttgtctgcttgatgtcgaatcatgtagatcctcgtaccaacgtattccaatactcatactatccggtagctattaccttgcgaggggcctgaaccagtataatccgtataatccttgcctctttgtatgcttgatgtcgaatcatgtagatcctcgtaccaacgtacttcaatactcatactatccggtagctattaacctattaagttagtaccttgcaaggggcctgaaccagtataatcattacctctttgtctgcttgatgtcgaatcatgtagatcctcgtaccaacgtactttaatactcacactacccggtatacgggtatcccctgtcgatatttcccatcaaggactagtcgatgaggtcaattaaatcgccgcgttggtggggacctgaggagatggggcgcaggtgggatagagagaagaaaatatatgataaaaggttgtgtggtgggattcgaatcctcaacctcctcatttcatacgagcaaccccatcactgagctatgttgggttgtgtgataatagtgcatatctcagaccatatgaattgtgttgagctggcggttcaaccggttgaaccaatcaaaccatgaaccgaggctatgaccagctcaatgttcggtccggtcctaataactatgtcaatgagtctgggttgccatctctccccgactatcatgcttcccggtaggttgaagacactttttaacctattgaatcaaggattgagcggttttaattacccgactcgaattatctgtatcaaagttagtattttatctctctctctctctctccgtgtgttggttgggtgagaggacaaaagttttgcaacttgaacaaattttagttgaatttaaatatttttcatgtatttgcacaatatatttggccgtgtcctatattcctattgggatccaccgatagatccaaaatctcataaatttggttccaagattgtgaaccctgaggcagccaagttgatccaagccaagccaagtcacacaccgcatgcgcgcggtagcaacgtgcgtaagcacgtacacacgactacacaagaggccagccagccaagaaccaaaggggcctaggtggtggagggggatggcgaggcgtttttggccacgcaaacgccaaaacggaaccgtcccggtcgagatccccccctccacgtcggcctccgcgcgcgatacgaccgacggccaggcctccacacacgcatacctatggctgtcccggccacagccccggcgaggaggccccctcctccatgtcttctctctcccgcagtcgccgctataaatattgccccccggccctctcctcctcatctcccctgagcggagcccagcacacacacagacagtgtcgacattagccgttgcagcactcgggcgcgtcctctgaattgcgacgggatcccctcgtaagcgatctccgcacccgctgcatgcatgcaggcgcgtgtggttctctctttccgtttgggttgtgtgtggttttctgattcgatcgtgttcttgggtgtgcatacaatgattcgttggtgccgcagctggaaccggaggagagaaacggattcccgcgataattctggcctcagcgcttggtacgattcggtggatttgttgatggtcatctaacaggaggagagatcgtttcgccgggaggaggacgaaatcagggaatcaccgaagaacgcgcggtaagatgagagataactaatattttctaatttctgctatgccgaattgccaaaaatacgatttgcataaggattaggggctcgtttttgcttcaattgcttgtgattgtgataatctatatgccttaggcccgaagttcaatctttgctctcttctttcttaccattttcttgctttctgattggcaatgccaacctaagttgcctttctagccctttcctgtctctccatactggcgatggtgaattaacgggaagaagtgacaaacatgagtcacttgcaatgcgcatcccaataatggtgatatgccatcgtcactgacttcaggtggtgcacctaaaggctaacgctagcatgcagccgtgttctgtttttcttgtctttcttcttgcgaggacatgggagtcatgtcttgagtggttgatgagtatacttacattgggtatttacaaaagaaacactcgctcgtgatttgatcaatagacctacttcagaatttcagctgatggttcactctccgagcgtaatggctagtttactactttatccttttcataatgtaagtctttctagcattactcatatttttatatatgtctagattcgttaacatttatataaatatgagcaataatagaaagtcttacattatgaaacggagggagtactccctccgtcccatttaaacgcaaccataagtttttatatctaattttaatcattcgtcttatttattttttttatgattagtacttttattgttattagatgataaaatatgaataatactttatgataaaatatgaataatactttatgcgtgacttatgttttttattttttttaaaaaaaaataaataagacggacgataaaagttggatacggaaactcacgactgcacttaaaataaaacggagggagtagtatcttcagagtccaaaacaataggaggaaaagcatgcacctttagtttcctagtactgtcgagaagggctaattggattcgtgccattaaaatggtttcctagtactgtcttctttcaaaaaaagtttcaaagtacagtgctagctgcagcctgcagctgcacttgagtatttctttgctagggaagcgtgggaacaagggacgtaacaaaccatagtgtcgaaagatgcttacttggctcttggaacaccattgagccatctaatctatgttgttctgcatcctggagttgggcatcgctaaaaggaggccagagatttatctgaaagtgtgactagatgattctgtgtcaccttgctaagtgtcctgtcgttctggatctgtcgcgaatattttaagcttttgcagacatgttaacattatctttgtggttcttgtgttaaagttctgtccttttccatgtactctctgtcactgacatgttggaccatgagattttatgcctttattcatgttgaggcttgatctgtactttggcactaaccatatgtatagtacattaagcttctaggtcatttgctgaaagatttagatcatcactatgtcgctttcttcatgttttgcttcaacagaaaagttgtatttcctgaactctgaacaaacagtactggttgtcgttctgaattgaactgtaaatgctataccactagacttgatcgattcgtttctagcggcatgctaattgttccattgcagtttcaggttccctcagtaaaacgccaagatggttaatttcgggaagagactgatggcggaccaattggaggagtggaaagagtatgttgattttgaactctgaaagttccttaacattttgccatgtggatgcactgatctgaatagggtataagtgggtcgacccgcgaacccacttatttggcctataagtgggcttgcgggttggcccacttacaccgattgatatgcataaattagatgtatatgtctttttgaaagaaaaaaaagagcataatgtggatgttgcttgattgcccaccctttccttttccttgaagttatgaatgaaatttgtgaattgtaatatacggaaacaggtagtgaaaggagactgaatcctgtacagaagccatacttctgatcttctaaatattgttactaattatttatttttgctattgtaggtactacatcaattacaaaatgatgaagaaaaaggtaaaacagtatgttcagcagacgcagaatggtggaagaaatcgtgaacaggttcttaaagagttctcaaggatgcttgatgatcaggtaaaacagactgaatttccttcaaaatatgaaagaaagaaaagacctgagttgttgataaaaaatgtcgttcttgttttaccacttaacatcaagtttcttttgtgtagattgagaagattgtgctctttcttctgcaacaacaaggccatcttgctagcagaatcgagaaattgggagaagagcgtgcattgctcatggaacaagcagatgcatcccaaatttctgagctacgagaggcatatagggaggttggaattgatcttatgaagctccttagatttgttgatatgaatgctaccggcatccgaaaaatactcaagaaattcgataagcgttttggctacaaattcacggactattacgtctccactcgtgcaaaccatccctgttcccagcttcagcagatcttcaagcaagtggtaaattctctttcttgcatcttcgaaaacataatttgcgctgtgaggttatattgttccttataactttgcacttgacacctcatgtacttatgatgcagtttatgggtgcagggtattgtggctgtagttggtgctttgtcgcgcaaccttgcatttctccaagatcatcaaggaaactttccatccatctatgatcatccatcaattaccttaaaggtactccatttcttgttaaatgttcacatgacaagatcagacatttatgctgtaaaatggagtgaactaactttccttctgatgcctcaggaccctatcatagaacaaataaatcattcggtgcagaaactcacacacgcaacaaacttactgcaattcatagggcaacatgcacttatcattccagaagatatgcatagtggctcagaagatcttgtcgatgaccagagctaccatttcatgtcgctgcttctgaacctagctaacacatttctttacatggtgaacacatacatcatcgtgccgactgcagatgactactcagtcagcctcggagcagcagctaccgtttgcggcgtgatcatcggatcgatggctgttgctcaagtgttctcttcagtttacttcagtgcctggtcaaataagtcatatttcaggcccctcgtgttcagcagcattatgctgtttttgggtaacctgctgtatgctttggcatatgatgtgaattccttaactgttcttatagttggccggctgctctgcgggtatggaatgtcttgttctttttgatctagtacttatgctttttttttgttagcttcctgaaactttgtaatgtttgttgtgctcgtttaatcattgcaatataaagctgttctagtgatcacactgatatatgttgtgtaggttgggttctgccagagcagtgaaccgcaggtacatcagcgactgtgtgcctctcaaaaccaggctgcaggcatctgcaggatttgttagtgctagtgctcttggaatggcctgtggtcctgctcttgccggtttgctgcagacaaattttaagatctacggttttacatttgatcagaacacgttgcccgggtggatcatgtgcttggcttggattacgtacttattttggttgtggatttcatttaaagagccagaccacattgttagagagaattcagtcaacacaccgtcatctgattcaggtaaaatttctccgttgcatagtttaaaacatagtttgagaagttatgccaaggacatgatggtaaatgctctgaaaatagtaattaagtaatttgctttgcatagcaggccatcgaagaaatagtaatttggaagatggtctagcacagccttttctcatagatgcaaaggagagtctggatgaaaatggagaggataatgacgaaaatgaagaagaccctgaagactcacataaaccagcaacatcacttgctgcagcatacagattgctgacaccatctgtgaaagttcagctattgatctactttatgctcaagtttgcaatggaaattctactgtccgagtcgagcgtggtcactacgttctacttcaactggtctacaagcaccgtggccatgtttctagcagttcttgggttgacagttcttcctgtaaatgtcatcgttgggagctatgtcaccaacttgttccaagacaggtaagcatacatactagcactagcacattaagttttgtttccttttccactataatcctcagtgtttaatttccactcgtttctcttttgttttctttaggcaaattttagtggcatcggaaatcatggtcctgatcggcatagccatgagcttccgtttcacctctcactactccgtcccgcaatacgtctcctcggctctcatcacgttcgtcttcgctgaggtgctcgaaggtaagtgacagtaaacaagagactgaaacagaagtgaggcgtgtctgaattttctgaaaccaccatttcacttctgaccctgtgaacaaaacgatgcaggagtgaacctgtccctcctttcccgggtgatgtcgtcgaggctctcgcgcggaacctacaacggcgggctcctctcgacggaagccggcactttggctcgcgtcgcggcggacatgacgatcacggcggcgggttaccttggccagaacagcctcctgaatgtaaccctgcttccgtccttcgtgatctgcgtagcttccatcgtcgcgacattttgcacctataactccctgtactgagaatctgttctctccgtctgtatgtacaagaagcagttgacacagttcctggccacttgggtggcctgtaaaatgttaggccgatgcagctaatgctggtctctaattgtcatctgtggaagattaggttatgtttgtagtagcagttactaagttaacagatgatgtaagagcatgttcaataaactctactgatcaaatgctccaaaagcctcttggacaatcctgcttgcaccggaccagcgagttccagggcaacggcaagagcataaaaaaaatgtaggctcagcggccaagcaaaggttaattggtgcggatcagagtgaagtgaggtgatcaccggtggtttttgccgttttggtttcttaattctgagtcctttctttcgtcacactcatggcatgctcaacataggacgactcagtcaagtgtgcatagactatagtagagaaatacttctgcggagcgaattattagagcatgcatctggtgctgaaaattgtctacatggtcgccagtgatcagaattcagacattatactgttctatgataatactccaacaaacacctgtgttcatatatatctgactaaaacggtatatgttgcacgtagtgtgcgcttgtggtttgtggtgtatgtgtgtgtaatcgagaaagaacagtttttaatctgacatgtgcctgtagtttgttgttttatgatgctacgacatatcatcttcagaaatgcattctgacaacagatacgctctggataattacgccataaaccgaggatggcgtatttcaatcttacgtttcccacatctcctctcattcgcctacaaaataagcagacaagcacggagcagaggtgattaacatatccgaatctgtcgaacacttgagctgacacaaaggctgcggagcatgaaggccggaggccggttccacttgcaccaaaccgtaccaaaccagactaacggcccatgcaacaacggtttctttagcaaaccattcatctctcgccagtatataagcacacctgatcctgtacgccaaacacatcaaacacgacgcacattcctgatctcgtcagcacagacgcagacgatggcattcctcgttgccacgaccctgtttctgtttgggcagctactgctgtgcttctctcaacaaggtgatcagtcttgttttttgatttcttggtccgtctgatttttactgattcttgtaatcatggtgtgtgtgtgtgtgacagtgcgaggtgtgaactacacgttcatgagggaggcggtggaggcgccggtgatggcgtactacgactacatcatcataggcgggggcacggcggggtgcccgctggcggcgacgctgtcggagcggtaccgcgtgctcctgctcgagcgcgggggctcgccgtacgacgacgcgcgcgtcctcaacatggcgcacttcgcggacgtgctcgcggacacgtccggggcgtccccgtcgcagcggttcgtgtcggaggacggcgtgatcaacgcgcggccgcgggtgctgggcggcggcagctgcatcaacgccggcttcttcacgcgcgcggggcccggctacgtgagggccctcgggtgggaccccaaggaggtggtgagcgcgtaccagtgggtggaggacgtggtggcgttccagccggagctgggcccgtggcaggcggcgctgcggagggggttgctcgagatcggcgtcgtgccggacaacggcttcacgtacgaccacatcctcggtaccaaggtcggtggctccatctttgacgcgcagggacggcggcacacggcggcggacttgctgcgttactcgcgccccgacggcatcgacgtgtttctccgtgctagagtggccaggatcgtgttctctcgcaaaggtgaggccatgtcacgcataatttagaaaaaccacatttttcttgttcaaaagctcgtgttaccaacataccggtaagtttgttaattatcgacggcaagttaattgttgtggcactggcacgcacttggtgccgctgcgctgtactgccatagtagttcgcgcgcactgaaaacgcgcgagatttgcagggaccaagcccgtggcgcgtggcgtgctgtaccacgacgcgcggggtggatcgcacatggcgtacctcaaccatggcgctagaaacgagatcatcctgtcagcgggggcgctgggcagcccgcagctgctgatgctcagcggcgtcggccccgccgaccacctcgaggagtttggcatcagcctcgtcctcgaccacccaggcgtcgggcagggcatgtccgacaaccccatgaacgccatctacgtgccgtcgccgtcgccggtggagctgtcgctcatccaggtggtcggcatcaccaggttcggcagctacatcgagggcgcaagcgggtccgactggaacagccgcacctcgggcgccgccgccgcgcaggtgcggagcttcggcatgttctcgccgcagacgggccagctcgcgacggtgccaccgaagcagcgcacgcccgaggccatcgcgcgcgccgtggaggccatgagccaggtccccgacgcggcgctccgcggcggcttcatcctggagaaggtgctcggcccgcagtccaccggccgcctcgcgctccgcaacctggaccccgacgacaaccccaccgtcagcttcaactacttcagccaccccgacgacctccgccgctgcgccgcgggcatcgcgaccatcgagcgggtcatccggtccagggccttctcgcggttcgcgtacccgaacttcgccttcccggcgacgatcaacgtcacggccgagttcccggcgaacctgatgcgcatgcgcggcggcagcgaccccagggcgctggagcagttctgccgggacaccgtcatgaccatctggcactaccacggcggctgccaggtcggcagggtcgtcgaccgcgactaccgtgtgctcggcatcgaggcgctgcgcgtcatcgatggttccacgttcaacgcctcgccggggactaacccgcaggccaccgtcatgatgcttggcaggtatactcctatctctctgtgttcaactgttcattggttgatttcgtgccaggaatgttctttgcatagttcagtggtcaacctgatgtatccttcgtgtctgcaaaaatctgacaggtacatgggagtcaagatccaaaaggagaggatgatagctgaaggatcaggaatagaaccatagtctgcttctctgcatgatacacgagcgcgctgcatttgctaatttctctctggattatctttagtgatcatcctatagatcggaaatgctaattgtaatcgttgaaattacattattaactaatttgcacgattgtgaatgctatgctacctataaagaatgatgtggtgtttgtcactaaatttactgacgccagaaacttttttgttctagaattatgatatgccgtgatactttcatggttccatgtcctggagtaacgagtgcattccaaaccttaattataacctagtttgccattatgcataaactgagtgcttgatatgccacactaagcgagtacttatctgcaaaattaacggtcactggacactggcgatcagggtgattggggtcgatcttaaacggtcaaacaacgaaccgtcagtttgtactgacgtgtgagaaccttgatttgaactgacaattttcactcaaactatttgatacttcccttcttttttttttattgtaacgggttcaatcaagccaacgccgatgtactgtacaagcaagtattctgtattcatgtgctgtactcgttacgtattttgtgtggtaatggtagcgtcataatgtctgaacatgctctacatattgtcagattgaagcctccaatcactctgaaatcagttactctttgcatgtaaggtttgtttttaagcctttataagatgtgtaggtagtctgtcatctttgtacacggtttcgctgtctttattaatgccggtgcaggtaccgtcttgcttttctttctttttggttttaattttgagttgatcttcagggaccttcagggttctctttccagcagagctctggctgaatacctttctctttgggatgaacttcaatcagtggctgtccaggagggtgtgagagattcggtggtttggaggtttgctgctaatggagttttctctgtgtcctcagcctatgatctcttctttcttacctcaactaagtgcccttttggggaagcaatttggaagaccaaagcgccggcgagagtcagattttttctttggttggcagcaaagggcagatgtttgactgcggataatttgagcaaaagggggtggccgcataatcctgactgtcttctttgcttgtcggcacctgaagattgcaaacaccttttcaccagctgcacctacaccaacagggtttggtcacttttgagaacttggctgggtattggctttgatctgcctggccaaagtggagaagaactggcggtttggtggcagcgtgcgcgcagctgttgtcagcccagctacagagatgcttttgactccttcttcatgttggtttgctagcggatttggaaagaacagaatgctcgagccttcgatcaaaaggagaaagctgtggagtcgctcgttgcagacattaaagaagatgtgatggtctggagagctgccggtatttttcagtttagtgaggagtagacctttgagttgctgcttctgtaaatagttctccccttttctttttctcactttgtttcaaggcttttgccttgactcgacaatttaatgtcgggatacatgtattttactcccaatcttaatgaaatttggtcggcattctttcgccgacccggcaaaaattttgagttgatctttttatctgcttgcttcctattatcatcggatccccgaagtgcaacttccagtacttcaaacagacgaacagagcattggattggctaggaaaagttaacgagtcccaagttattcggaggactaggttttcgagatattagatgttttaatcaagccctacttacttagcagacatggagattgatcgatactccagaaaacttgtgtgctcgggtactgaaggagaaatattatccaaatggatcattaactgatacaacttacggtacttactcttctgatgcatcgccaacctgaaaaggtattgaatatgggctagaattgctgaacaagggtttgatatggagagtaggagatgggcgccaaaccaaaatctggaggagccaatggattgcacatggggaaaaaccaaagatcttgcagaagaagacctggaatcgtcttatatatgtacacaagctcatgaatcctgacaccaaaacatggaatgaaccttgaattagacatgtagtcaaggaaaatgatgcatctgaaatcctaaaagatcaaaatacccgaaagggagatgcctgatttcccagcatggcaccttgagaagataggaatattcactgtcaggagtgcttacaagttagcgtagaatctagccggaaagatatgcattgaatattcatctagctcggcaacagatggagagacgaagatctagaagaatatatgacaaacaaatgtccaacgaaaagtgtgaattttcgcctggaagctagcccaagacagactgctcacttggggaaacaagagaaaacaaaagatataacagagtggcatttgcccgatctatggtctgacagaagcaaatggtgtccatgctacggtggagtgtactgtggctagaggtttacaggagacaatgagagcacactgggtattgccggaagaaaggagtttcaaatggacagggcctgattggttgctagtgatgctggatagtttgaacagattggtgaaggcacatgttctgtatttactttgaagagcctagcacctgcgaaatgttgtgatccatggtaaaggaaatgcatcaatagttgactcggttagcttcctagtaagctatgaagtcaactattgccaatctgacaaagggaagatgaccacaaagggaagggccctttgtgtatagaaccaaaccagaaattctctctacaagtattgacagacaggtagagaaatggtgtgctccaccagaatgaaaactgaatgttgatgctggctatagggaaagaaactggggatgcaagtgtcgggtttatcttcaaggactggaggggcttggtgctacttgccgaccacaaagccttgcatcactatggctctgctgcccaggctgaatgacttcgagcgacggttgaactgatccacattccaattgtgatggagatggataatgtagaaatagccaaagacttaaaacagcaggttccttgaaatcggcttggcgatgacgattgaagagattaaaggaataatgcagtgttttcaacaagtgcaagtgcataagataaagagagaagcaaatatggtagcacatgttttagcccaaatggtaatgatcttgtgcatgcggagtgaaggctgtgtactcccacaagaatcctagacttaatgaaccaagaatgtaatcccttattcacacattaataaagttctctctttaccttaaaaagaaaagacgaacagagcatcggttattcagtttcgttttttggttgtgtacattgtgtagagaccggattcttaatccattattaaaaaagaaatcacctccattagcaaaatcctaaagctaataccagcaagttgctgagaaagatagcagtagcgagtgaccgtgatattcaaagaacaatgaagtggccacgaaattacacaaggtggtcattatctaaaaaaagaattacacaaggtggtcgttatctaaaaaaaaattacacaaggtggtacgaaaagtaagaatttacaagggttcgttttccttgagaaccaaagggaagagatcggatagatcaggagaccgcgatgcaacttattacttgtcgcggactcgcggtatgtgtggtgggatcggtggatctaccgcgcccggttgtcgctagcgcgctagcagcagcgcgtgcgcgtcgccagaggcgtggaggcctcgtctcaacgctcctccccaaccaccaaatcacatggcccctgctgcatgctcgcttcccccgatcatcccgccggctaccacccctcgcaaattccgccctctaaaataaaaacgcaccgttcacgactccacgctgtgggagccagacttttctatactggtacagacgtgcagtctagtagctcgcgcgcacagtatgtcagtacgtagtggtatgtcttgcgcttgcgcctgtcggtggatggcatttctctcgcaaaatcgcgacgcggatgcacagacgaatcggcgatggatcatggtggatcacgccaggtgctgcagggccgcaccacaccgctgcagcgtcaccgtcggtgcagcacacgccgccccgccacccgcgcgcacatcggtgacagcatcagctcacctcggtagctattaaaatccatcccccttctccacctcacctctcctccctcccagacaggctccattttccactctcccctcctggcctcccacctcccatccggatctcgccgcgccgcgccgcgccacccttttccgcgccgcgtcgtcgggcatgggcgtcgccaccaacggctcctcctcctccacctcggagtcggcggagaccgcgcagtcgcaggcgtacaagttcctcatctacggccggaccgggtggatcgggggcctgctcggccagctctgcgccgcgcggggcatccccttcgcctacggcgccgggcgcctcgagaaccgcgcccagctcgagaccgacatcgacgaggtcgcgcccacccacgtgttcaatgccgcgggggtcaccggccgccccaacgtcgactggtgcgagacccaccgcaccgagaccatccgcgccaacgtctgcggcacgcttacgctcgccgacgtctgccgcgcccgcggcctcgtgctcatcaactacgccacgggctgcatcttcgagtacgacgccggccaccagctcggcacagggatcgggttcaaggaggaggacacgcccaacttcgtcggatcattctactccaaaaccaaggccatggtatgacacctatcttttctttcttttttttaagagaagggtttcttttacctggccactacatccaaccggatatatacggccatatattttcttatccacaatgaatggactatgtgcacatctgagcaagctaaccggccggctccattttgcttagtttacgatgacgatgtgtaattgcacgttggaaagttggaactatggttttgtgtgatcatggagtgaaaggtgacactttggttgaggccttgagggacgtatgattagttagtttcatgccagtactagtattgattagttctcgtttgattagatctggcgtggtctgtacaggaagcggatcccctgactgtgattagcaaagtcacaggcgtgcagttctgctcaatccaccatccattctcatcagacggtgcacaccacttgttttctcaattcctttcttctgctcaatccaccatccattctcaccccttcagagtctgcaccttcaaggccggtcgccatgtccgtcactcctaaccagatcgcaatttcagctgctggaaagctgtaggctattttagtcagattgtcgttgtaacaattaaaatggtgataggtggttgctagatccggtaaaagcttctccctttgcatgacctctacccaaagcactgaatgtgaacatcaccttctgcaatacgagcattttcttccaactaatggactctcactggtactcaaccataatcaaatgttccggccatctcttcgtcgagatgaatcatctctgtgcacacggctgcacctctggattcggatgccaagaaggtagataccgggatgaggtgcgaggccggaagatttgccaacggttagtccatttctgtgttttgtatcgccgattacaagatggaaggagtttttgagccgatgatggcagccgcggcgggccaagaaactaccgagtgaagcgagcaaggagaagaaaggaattggggcaacgagtgtgcaccgtcagatgagaacggatagtggataggatggaactgcatgcccatgactttgcatggcggtctgtacaatatccccaatatcttggtcagcgtgctgatgcagatccttatggttgacaatgttgacagcttgggttgacttactcctagttgtaatgatggcagactattgagtaaagcttgcaggaacatgtttccttctgccttctggaatcaaaacacagtattcattttggtctgtcgagcattctgatctgttattggtccatgcacatttgcacactagttctaagttttaaacttttcatagtatcatgctttgattttgtgtaacattctccatgatcttggccaattttaataaataaagggtagcaagtttccttgaatcaaatagctaagattgacactagaaatcctgtcaacatcttgaagttctgggagtgttaactttatgctagctataggcttagcctttactttgacagaaagttgtgctatttgaatctggagtttctataggtttagctaattaacgacttaaaatgtgctaccatatactttactagaattgtatatgttttacccttcatgtatgtgattgctgccaaggttacagaggcatttcatcttgttttaggattgtttccttgctggcattatcagatcattgtttcttggagtgcatgcattagttttaaagaaataaactcctgacatgcattgtaagtatagtgtgaccaaaactattgtgttctgacacttggtaggttttctgctggatgttctgggtagaaaaaaaataaatcattaacttctgtaggttgaaaacataccgatatgaaatgaatatgctgaatatgtagcgcaattggatgaaattttgtaatactagagaaaagaatactttgcgagttccaattaagtgtcaagtttattgttcatagccacattatttgttttccacaatttgtttcgaagtttcaacctataggtggttgagttagatgagaagcaccaaatatgcgtttactttcacaagtatgttttttgagttattttgaatcccctatatgccatgatcttgaatctttgcaaacagttgtttatttatcgaacaaaatggtgtctagtctcacagagagagatcctctcactagcagaatcacttgtctgaatttggttagagtagtttgttgtgttaccatgctatcttgttgtcctgtatgttcatgatagtttctatttttaaatcagattatttttcctgacttgtatttcacagttaatcttagcattgtttttaacaggttgaggaactgctaaaaaactacgagaatgtatgtacacttcgtgtaaggatgcctatttcatccgatctatccaatcctcgcaacttcatcactaaaatcgcccggtatgataaagtggttgatataccaaattcaatgacaatattggatgagcttcttcctatctcaatcgaaatggcaaagagaaacctcactgggatctggaatttcactaatcctggcgtggtgagccacaatgaaatattggaaatgtatagggattacattgatccgaatttttcttggaagaactttaccctggaggagcaagccaaggtcatagttgcaccgagaagcaataatgagcttgattgtaccaagctgaaggcggaatttccagaacttttgtcaatcaaggattctctggtaaggtatgttttcaagccaaatcagaagacgtccaaggcttgacaaatggaacggtctgcacacaatgttgttgttatttattccatataaattgacatttctctccctggtgacaatcaataagcatgcatgatgactctttccctgtgtgtgcattgtttttgaagcagataggtttctcataggaagtcataccccgtcccgtcatattgattacatagaacaaggcaaggtgccatatagttcaacttttgtatgtcttctggatcgtatgaataccgtgggaaatgggtaagggtggagattcctctgtttgtatcttacaattggaatacagtcagttgcactgcgtgttgttcaataggaaatggctttggactttccttcatgtaacatgtaatgtaatacattgaattctcagctaatatattgatatttgatagtatcgacttaggtgatgttattttctcaaagatgaagattaagtttttttacgcaaaacgagctggtattaacatatgattgattgagttttaattactacaaacttgaaaattaaattaatatgatatcttagagcaactttcatatagaaagtttccgtatgaaacgcaccgtttagaagtttgaaaagcgtgtcacaaaaatcttaattttcgtccaactcttgttgaagaaaagagcaggactaagacatctgaatttccaattttgtttttgaaggagggtgaattgtcacaaggtatagcatattagctttgatttcttaatttctttccatcgttagattttgtgccggggaccgggagagggaaaaccatcatgaatagcataaatcaagccaataattcatcagagaagaaaatgtatacctcatcaactactccgtggaaatacatactccatctatttctaaatatttgacgcagttgactttttaaaatatgtaaccgtttgtcttattcaaaaaatttaagtaattattaattattttcctatcatttgattcatcgttaaatatacttctatatatacatacagttttacatattttaaaaaaatattgaataagacgaacggttaaatatatgctaaaaagtcaacggtgtcaaatatttaaaaatggagggagtatttgtttagaggaatcaaaatgattttgtagatcataccagctcaatgtcggcgactcggttgctgttgctcgctcctggcggaagcagaattttttttatttataattttttttattaaaagttttacaaaaataattttccattttgaaaattgacggaaatagtcgcctaccgccctctgggagggcgatttttaaaaatcgccctcccagagggcggcgaaaatgacgtggcagacggccgttcgctctcgggcgacggccgtcaacgaaatttgcaggcggcccccttgccgccctccgcgagggcgattttgtactgtgcggggggccgcctgcaaatgggcggcgagggggggcatggaaatttgcaggcggcccccttgccgccctccgcgagggcgattttgcactgtgcgggggcccgcctgcaaatgggcggcgagggggcatggaattttgcaggcggcccccttgccgccctgggggagggcgattttgtactgtgctctatattttttttatataaatatcaatagttatcaaatctttttatattgaaaactatagaagattaaaatctccaagattggtaaaatacaattttattattttttagggcatatttggaatgttaccgtacaaatattttgttaatgccaaaatataagcaagttttggcactaccaaatatttggtaaggtaaaattgcatttgatcatatttggtttgctgccaaaatgtaaaattgtagtgaagaatgttgtacataatctcaattctagattacgtattaccaattaataggcttccattttcgtgtgtggtgtggtagtgggaaagaagatatgaagaggttgccttcagattgtcaattatatagcgtcgttttcactgcaatatatgtgaactcaatgagatacattattcattagatgtgacaagacgatcacgcgtgggcgtgattcactttatgtcaacaggcagcgccgaaagttgatagtgataactcgagctgccgcttttcatgtgtgctgttgtggactgtgcgcgctactggatatggcactaccgtgaagcgccgaaagtgtgttgttgtgagcataagttgttcaagcaccatacgaatgaaaagaactacgtagacgagacaaacacaagtagtactgcagtagtaatagcaaaagtagtactgctttacaagtttgtaagccaaaagaaacggtcacataaggactgaagaggtagaacactactgacgaggcctcttacccctgtccctcctaccctgcgccctaatgtgcccctgggagtacgtgagtcggtccgggggtacggcacggccaacccgtcctgcctgtacaggtgtgacctctggctgctcctgagtgtgcgcctctggagctcctccaagctgagaggagcctagtacgtcctggtggtctgcaccgtgcaagtcgtcgtcgtagaactggctagtaggaccagtcctaccggcgtgagacgaagaggccccagtaccgaagatcccggctgcaaatcctgctggacaaggatcatcagtttcgtataggtatttaacagtattaataaaaagtaaagtaccgtgtgggcgagggatcgacgctccgtgagaggaagagctggcgaacgcgcctgaagaggtggcgaacgcccctgcggagctcgcggaagcgccggtcgtgcctgcgaacgcgctcgaaggcatacgaggtcctgcgatgaggaaacgtgcagttaaaacatggtgacacattcgtgcaaaagctgaaacaaaaatgaactaatatctgggctgaactgtaccgtgcgaaaccggtgctgtaggtcgcactgctccgaagctaggggcgctcgaagacaaacgaggtcctgctccgacggtaggaccgcgaggccgtgggtgtaccggaccagctggaggtacgacgtccacggcgctgcgacaggagaagacgcgcatgaccgcacgcatcttctcctgcatccggtcgaaggtcgacctctgctcaacgtcagtcaagtgcaaacctctgttcaacctcacctggactgcggtgatatcggcactgatatcccgtgccgcatcagcctatgcaagatggaaataaaaaattcagtagttgtcctatattatgcaagataaatgacataattgttggaagtaatacaaattggacgtaccgccacgaagtagtctcggtcacggtgcgtgggatacgcgtccgtgacagcggcaacgtgcggctctggggcgtctggagtgaaggtcacacgcgcacgagtgcgaggaaggtaccagcgaaggtagtcacggtagttctcctccgtgtgtgggaagagctcgttgatcacctcctctgtagctaacacccagtcgtcaacgtactgctgtacacgtggagcccaaagtgcgcctgctagctgtccccgtcgagtcaacctgtgaagagaggtaaattgtatggctcgatgatgtaattatcataaaaatttagaaatgaacaatccgaactcacgagtggtcggcaggggggacggtcggctgcacgttgccgggaaacacctgcctaagtccgaactgtctcatcacacgctgcggccagtgaggctcaacgaaaatgtcgaacaccatcggcaggatggtgagccagtaagcctggtcgcgtgtgcacaaggacgaaagtcctagcggtgctctcgcagcgacggcctcttctgtgtacggctcccagatgacgtcgctcggctggagacggtcaaactcgaacacgaagtccgggtaaccacgtctcacctggacgtgagcgtaacgacgctgcaataaacatgatcggaattagacatgttatgtgaaggaaaaaaaaagaagaggactgataaacttataacgcagcgaagttgcactaaccccacatcgacaccagtaagtccccatcgtgggaccgtcctctggccactgcgcgctgcgaccaaccccgtagggtgcgctgtccaccactggtcgccctatggcaaacctctcggctgcccaaagctgaagcaacataggacagccagcgatgatcgctcccgcgtcagtcttcgtgcacgcctcacagagggcacggtacgtggctgctagcacggcagaaccccagctccactgcggcacgtcctgtggctgagcatccgcgatggaccgtgcgtagtggaccagccggaagtccacagcgtgcccgtgggtgctagtgaacatcacccacccgaacaaccacaacaggtacgcctcaagggagcgtcggaccgagtaatcatcagcgtcagggtgcagaaggtccgcctacagttaagaatgaaatgttagtacaaaacactgatccggtcgcaaataagcacgtatgataataacaacttatgtacttacagtgaactggagcaaccaagccttgctaggcccgactgtagagtacggaggaagggtggtggtcggtcctaggtgtggaaggcgcatcacctgctcgaagcgcgcagtgatatcctccttccacccaaaaacaccgtcgacgggaccaactggtgctcccgccagcggtagcccgagcaggtacgacacgtcctgcagtgtcggagccatctccccacagggaaggtggaacgtgtgcgtctcaggtctccagcggtctacaagagcggcaaggagtgaccggtctgcatcccaccgcttcgctgggtcacggtcgtcccccgccgcctcaacaagcctacaaagtggtagaaggcctgccgcacgcaacctgtatagagcaaacttcaaacataagtataaaacaaagaaaagttgagttgaaatgtgaacatacgcgtaccaaggaacgtgacgggggtcgacacgcaaccactcgcgcgacgtgcgtggacggaaggtgccgagctgtgcaccctcgactgctgacaggaacgagcggtggttcctgtcaatcccacggttcaacagcgccggtgtgtcgtacgccatacctgcatcaaataggttgatcagaaacatataaataattagttcaacataagtaataaatgttcataagcgaattactaacacatattaaacaagagtacaaacaaacaaaagtgtttagtccgaacactcatcacgataacattatgatacaacaccgaatagttcgcaatactactagtacaacaatagtcggaggtactcattacaacaagattgaattgaaattacacgatagaagtatttagtccgaacactcattacatcattttatttcctaaatcgaaagcattgttacaccatggaatcgcctgctgcgcgacgacgccttggccttgcgcgcctgcttgttgttccttcaccaggtggtcgcctaccatcacttgcctgtccagatggactagcatctgcgccgcttggaacttctgcattcttcgggcatgtcttgtaagtatggccgcgcagatcacacttgctgcagcgtaaagtcctcccacctgcttctgactcatccatatcatttctgatgcgtctagtttggcgtcgaccctttttcaccctaaacttagatggatctggaatataaaaaacttgggcactcagcgttgtgtaagatcctgagatcccgaacccatatatctcctcactccatgtatgaaagattgcttctttcctgaaataatttgagacgtacacattgggagatatgccacaatcaccggcagcagcaagaacgtgtgagcaaggaaggtgatgaagcttcggcttcatacaactgcaggtacatccaccatccgccttcaagacacattcctgcacggcttgcttgcgatagataccacgcctgctcctatcaacacacattatttcataccgatgcacttgtgtgccttgagcaacaactctatgtctccgtgcctttttgattttatcttccatgtactttgtcactacgttgccaaacactatgttgttatcggccatggacggaccaattttcttgtatcgatccctaaagtaggcttgcgtgccgtgaaggatgaattcaacaatagcaaccaatggaagtacccgaactcctcgcattacccagttgtacacctctgccaaattggttgtcattatgccataccgagatccatcggtgtcgaacaatagagcccacttctccttaggctcattctcaatccactgagagaaatttctgatggccgaccctgacctccttctcattgttggtgggtcatcatgtaatgcaccaagaggtatgggaggctcgtcaccttcaacttgtggtctgcgagattgctcatctgtttgcttcgttgtcaactcatccaacttgtcccacaactcattaaatttcttctcttggttctgtgcacagagcctcttaaagagctccataagatgcttgttcttgaattgcttgtagaaatttgcacccatgtgacgcatgcaccaccgactccgaacatcaggccacttagctggaagtcccttctcatcccaaccgttctgcaagtagtcaatagcccgcaacatacccgcatgacgatcatgtataaggcaaacgttgggcctcatacgcaccactgcaatgtgcactctctctaggaaccagtaccagctttcagtgttctcactctctacaaatgcaaaagccataggtagaacctggttgttcccatcacacccaattgctgtcaatatctgacctcggtatttacctgtcataaaagttccatctatgcatagaacaggtcgacaatgcacaaaagcattgatgcaagcacccaatgagaaaaaggctctttgcagcacactctttgttctatcttcaaccgatgtaaatgtatgtaggtcatagtaagtattattattcctctgggcaatggtggctaacaaacgaggcaaattatcataagaagcttcaaatgtgccatacctcatctcaatgatcttttgtttggctctccaggcctttgcatagcttatggtgtacttgaatttgttctcgatgtgcctaataattgattttggttcaaagccaatgttaccaacaacactgctgtacatctcacttgccacaaaagctgaagtgatgtttcggtgatacttctccaccccttgtaagtagcacttgtgctcggtcacaatgctaactttccaataatcattccatttacccttatatgcatggacacgccacggacaatcttccttcatgcacctcacttcatacacataatttgttgacttgaccaccctaaactctctctgcaatgaaactgcccaatgcttcaccgcctccttcatctcatccttatgagcataccttgcaccctcaattacctcgtactccttatactcccagggtacatgatcaccctatgatataacaagaccagagaagtcctcatttgcccaatcagtggccattacatcaccttcctcatcggatgatgcgtcgtcctccgcttgctcattatccgaatcttccctctccatttcatcaacaattataccgactctctccccctcatccgccatgcccatggcctgctcctcccttggttgattttcctcattttgcatcgatggtccaacaacatcccctgcattgctaggaccctccacatcttcggtttgcattgaaacatttgtatctttctcttgtaccgacacaaatataacgaggggccatgaccgttcaaaagccatttccacataccgtctccaagcagcagtgctgtccatcggcattagttcccaaaaataaccttctattgcacgactcactacaacagatactgacattgtgtagacttcttggtctattctaaatcctctcaacaaccaactataaattgactgaaatgttctctccgcaggcctatcgatgcccttagatgtcattacaaaatctgacagatcaacaccatctggaccaaatctaatatttccttcaccatgaactatctgaaatgtgaccttacttgacattgtgcctgatgaaaacaataactgcgttaacctcgcatttctgtactacgccctaagttacattctctacaatattgttctctaaatttctaaaagtaggttacattctccagatcaaactaaactacatcttacaattaacactactgtctatgtctcaattcatactattatattctatgctctggatctacacatatgtgctgtgtgctacagatctgctaaaatatatggaactaaaactaaaacgcaacatatgtactcaaacgtaatatattagtacaaatgcaaaagatgtatgggagcatacctgtgatgaagtgagcgaaccagcagggcttcgccgctccccttctgctgccctcccctctctctctctttcgttttttttggatttttagtgaatataatgaaatttcataggggaggggctgggctttataggggggaggcaaaaatcgccctcccccagggcggcaagggggccgcctgcaaaattccatgccccctcgccgcccatttgcaggcggccccccgcacagtgcaaaatcgccctcgcggagggcggcaagggggccgcctgcaaatttccatgcccccctcgccgcccatttgcaggcggccccccgcacagtacaaaatcgccctcgcggagggcggcaagggggccgcctgcaaatttcgttgacggccgtcgcccgagagcgaacggccgtctgccacgtcattttcgccgccctctgggagggcgatttttaaaaatcgccctcccagagggcggtaggcgactatttccgtcaattttcaaaatggaaaattatttttgtaaaacttttaataagaaaaattataaataaaaaaaattcgcggaagcattcaatacggatgagcccagaacgcctagcgcaccacggcccaaataaaacctagcaacacttctctgttttatgcggcccatctaattagccctattttacacttacgtccctgtttcagaccgctgccatcgcgagaatccttacaatcagttgaactgaaacattcttttttgcaacaaatcactcacatattttagaaaccctctaataagggaattcgttttattttttgttccactaaaaatgtttcacctagtgtactcataatgtttcactatgtatagatttaatgttacagtgaactgaaacatacagtgaactgaaacattcttttgcaacaaatcacccacatattttggaaaccatctattaagggaattcgtttcattttttttccaccaaaagtgtttcacctagtgtactcgtaatgttccattatgtatagatcaaatgttgcagtgaactgaaacattctttcactatttgctgaaacattgtttttatataaggtgaaacaacgtctgatttaaacaactgaaacattttcgatctacttagtgaaacaattccgatatacttgatggaacattatgcaacatttaaaaataattcaataataagctaaaaaaatttcgttggaatatatccatgtgtggtcttgttttaaagatttaattgcaacgaatgtaatggtgcaatcagatcatgatttggataaataatttaagataaaaataatttatagtggttttgcacgcatgcgtcagtgtccaatttttccactcctccttcggcgcccgatgcctaggctatcctaccattggagcgatcctattttctacaaccagaccctttatttcaaactgttatcaatgcctgatcctattttctgcaaccagaccctttattttgaactgttatcaatgcatttacatccctaactatcctatcaattttctgttaagtccttgttttggatcgtaaacatttgtaatgatccagtgttttcaacaaagtccatgtattttgtcagtctttagttttttaaactctatattttgtgattttgtcagtcaaattagaccgctgtagatcagtagatgggcgggttgttgccttgttggccttctacgcctttggctgccggctgcctctccgcgccgcggatgggcactgcggtgcatggccacgcatcttccaactgctcctgtgcagaagaagctcgtggaacgacggttctcggcttctcgctctctactccctctaccaccgcctaccggcggccaacagagcaaagcgcggcaaacgacaattcgggcggactgacatcttgactgattgagccgccgggctgtaaattgttaatgtactggtctatgtggctgtatgaacggttcgcatgctgcaaagctatcgagatagggtatctgcttcccggtcctctgagtagatgctgttggagtagattgagaggccgccaggctccagcaccaagcatttgccatggacagattatcagactccgatgatcatagctatccccggccggagataggataccttccgacgccacgttctcggtgactcggtccccgtccttcccgaacagcacgcgacgacgtcgacgcctagcggcatgcaggccagctctggcaggtagcgacacgagttggacagctgggccgtggggtaacccctgcagcaacgcaactccaaagacggcgccccccaccgcgatcagcctcgctgtccgtgacaccatgatcgcgagcacggagaatacgtacgcgtagcagcacaatcacgccctgacgtgcgtagacgcggacagaaacggtggacgcggccgcggtcggcgggagcaacggcacgccatgccctcgctccagtatccgtagcacgcgccgatccacgggccccgccccgctctggatcggagatcagcgcgcggcgagcccagcccaaccctgctgctgcaagctgcatgcgcaaccgccagtaggggggacctagtagaaaaaggaaggaagcgaagcagatcgcctccgcttttccgtcgctcgctagctatccccaccgcgaaatccgccgtggccaaaaacgttcacgcaatcacgcaaggccttgcgctgggaaaaaaatttggtggagaccggatgtaaccagcctcctttgcagcccctctctgggttttaccgtacgtcctccccggctcgccgcacgcgcaggttgccacttgcctgtggcggtagtttctcattcttcttcgttctctctgttctgttaacgatcggtgtttacaaatgagtccgtatttgtaatgcgggttagcgtcagtgtgcgtttcttctgttctctctcgaagttcatcacggtatggccgaggcaatagaaaacgcggaacgaaacaaaaggctgacatgttgtcagaagtcagaggaggagtccaatgttcacgtgacaggcgagtagatccaagcgggcttaactcagacctggtttagttacaaactttttctttaaacttttaacttttccatcacattaaaacttttctacacatataaacttccaatttttctgtcacatcattccaatttcaatcaaactttcaattttaacgtgaactaaacaaagcctgaaactactcacacacagcaattgtaaaatagttttctcttcatgtttttggagagaaataactttgtccgtacttagggtgagtttgaggagaagaagatcgagaagattgggaagataaggaaaacgaggtaagtcattagcgcatgattaattaagtattaactattttaacttgcaaaaatggattaatataattttttaaagcaattttcctatagaaaattcttgtaaaaaatcacaccatttagtagtttaggaagcgtgtgcgcggaaaaggaggagctttctcactcaatgtccatggaacgttctcactccatccgacatccatccaaagaaatgctagtactacgggtgtgtttagttcacgttaaaattggaaattttgttgaaattggaacaatgtgatgaaaaagttggaagtttatgtgtgtaggaaagttttgatatgatggaaaagttgaaagtttgaagaaaaagtttggaactaaacaaagcctacgtactagtttcactaacggaatgaaaaaacatagaaatagaaaaaacaaaggcttctgacaggaatgaaagtgcaaaacaaaagattgcaaacacataggatttgaccgtttgattgtatcacaggaaaaacacaagaatcggataagagagatagattcacagaaaatttttcaagaggttaaagctcttactaaatttcctccaaaatctctataggattgtccattccataggaatttcacatgataagataggattcaattctttgtttcaaatgcattcaatggattttttttcctatacgattgaaatcatccaaaattcctatgtttttcctccaaatcaaatgggccctaaaatttctttgaaacataggattgacaaaaatggaatataaaatacattactccattcattccagaatataaacatttttatagttggacacggttattaagaaagttggtagaattaaatggggagttgttgtgattggaggagaagtggaggtaggtggaaaaattgaatggtgaagggttgtgattggtcgaaaagagaattttgggggagaagttgttatattttggggtggagggagtagacttttttttacaacaacataaatataaagtagagaattgtaaaacatgtaaaaatacaaaaattaccatttgataaaaaaaagaagaattttaggaaaggtagatactcaaagaaactctccgtgagattcgatcacatgttaaatttttctaaaacttgtatggattaaggtatttgataggaattttatagaattcagtggtgtccaaaactttatttcaaatgataatataggattatgatcctacaaggagttttccaaaacacccttcatcactataacacaaatctgatgccgacaaagctttgtgttgcttgggagccttcgagccttttttggacaatcctacttgcaagaagctatggtcaccgggaaccctaattgctcgcttggacgagatcgctactacaaatctttagtcatgtgagcaagtcaaggaaagaaaactattcaatatctaaaaacaaatgcatcaagcaaaacgaggcaagcttgtgaaagctgtggaaatagcacctatttctaaattgggaaaaatattgaagatgggttgctatattcatttaagggtacatttcaggggacacgcgcgtatccaaactccaaacatactaggaaaagctaaactaaaaagagatcggaagtctagcctttagtgcacgaggaacgtacggtcccaccaaacacatacatatattaacatgtgcatattttgacatgagtctagacaaattgtagatcaactagcctggtaggcctagaaatcacgagttctttttccttgcatacttgcatacgcatatatattaagggtggccaaatcccattggggtatgtctctgcccctatgaggcttgggacggagtagattttgccccatgggttccacatgcgcgaggaggggggatgttccattgtgcataaccaaggccagggatccattcctaccatgaggcctcgaaaacgataaggccaatagaaacaactcataattcttaagaaaacccatttagtaggctcgaatacaaaccggggttgtctagtgtcatatgaacgtcttgtggaaagaatcactcaaattccaatggttgagatctcaccaagattcatgaaccaaaaccttatcccctctatccgttctaattcctctagctttcactagacatctagatgcgcccgtcatcgccaccatagccttgacgacaccacggttggccacctcctctttactatctagatggactgcatggttgagtagatatcttcttctataactccagtgtcaagcttcctccacgccaccaagcgtccaccatctttggcaacctacgttgccagatccaccaaccccccccccccccccaattcctcttttaaccactcgatttgtgtcaccccgctacctacaccaacccaccgttgacttcttgcttgtgactccagtggcatcaacgtcgcctacggtacaagtcatgagtcgcgatcatgtcctgcgtgaggttcgtgctccaccttccaccgcttgctgctcataaacgagttcacgtctttaccatcgtgtctcgcatgcattggcttctatgcgcccacatccacctctactagcgtggcacctcaccagctctcaccctgctatctccatctcctccaccgttgcatcttaccatttggtgtgtctcagttgcacaccaacgaccgtgcaatggcccgatcaggtatttgggccccatcaagtttctgcctaaagaagctagcacggttggttgtggaagatggaatcaaggattagggcctttggggcagggccattcttgtccaacccactctcgtcatatcccattgccaacctagcacaaaacgacattctatatacactgtttttcttttcgtaagatgggaatattgcagaattagaatcaatggaggtcggcctaccaaaacttatataggtaaatgcatggtgcactttttcccggtatagaattggcgatgagagagcgacaatagtagtaataacacgttggtttatcaaccatagtaacacgtgatccgagcatccgtttttcacaaaaacacgttgctgcgtccatccaacgcgaaaagtagtaaacgagcagaagcgataaaaaggctgtcaagcccgtccgtccaacgcccagaaaatgtcgaaagtattttcattcgtgtcatctcccggcgccaggggccgacgccgcgacacctccgcgcgcgcccaccgcaagcaatgtacagcccacacatcccctcagcttccgttattacctctgcgcacaagttaccgggcgaccagacgacggggagccgtcgcacgcataaatatatgcccactccttcacccttcctctgacaactcactgccccccatcttctttcttcattcctcttcccaccaagaaccccaaaccttacctccattgagttcgaaaccgaggagcgaggagttacaagccgagttgtcagaatggatgaggagaaggaagccgactcgccgcagccaccgtccaagctgcctcgcctctccggcgctgacccgaatgccggtatgtgtttgtgtaagcgtgttctttttttttttttgagcgaacatgtaatcgtgtttgtgtgcaagtcgtgttgataagtctggcgtgtgtgttttcgtaggagtggtgaccatggcagcacccccgccgccggtgggtcttgggctggggcttggactcggcggcgacagccgcggcgagcgtgacgtggaagcgtcggcggcggcggcgcacaaggcgacggcgctgacgttcatgcagcagcaggagctggagcaccaggtgctcatctaccgctacttcgccgcgggcgcgcccgtgccggtgcacctcgtgctccccatctggaagagcgtcgcgtcctcctccttcggcccgcaccgcttcccttcccgtacgtgccaacaagatatttttctttttcttctcattgcgtttggcctgattggtgtcgagctttccgatcattcgataatgtggacgccgtttttgacatttgagtggcagtgatggggttggggaacctgtgcttcgactaccggagcagcatggagccggacccagggcggtgcaggcgcacggacggcaagaagtggcggtgctcgcgcgacgtggtgccggggcacaagtactgcgagcggcacgtccaccgcggacgcggccgttcaagaaagcctgtggaagcctccgcggccgccaccccggcgaacaacggcggcggcggtggcatcgtcttctcccccaccagcgtcctcctcgcccacggcaccgcgcgcgccacctgaccagtgaccagaccggcgcccgtttgtttgtttgtctcggcgcatgggaaaacccaaatccgcagggattatgtcatgtcctgtaactctttttttcctcgcaacttttgaagccaaaacaattctcaccgtgttcgatggcacgcgatgcttgtagttggagtagaggtagagtacttgttgagtttgagcggttgtcgcctgtagacgtgcgtgcgtgcgtgcgtcgcgtgatggccggcgacacacgacgcaggcggcaggtgcggcgataattttctttggttgggttgtggggagcgcgcctgcctcggtggcggtggccgcggtggtggtggcatgggcgacgggggggccccggcgaggggcgtgtcctggggccgcgcggggggagagagaaagagagcgctctgcagcagctgcagcctgcatgcactgaccttgtcagtcagtggctcgggcagagtgaggcattggatgctgctctctgtctgggcgtggtgcagtggcccagcgacaagtcccgactcgcactgcatgactcgctgggtcgcaggcaacgctgctgctgctgctgtgctgctcacttgacgcatggaaacggtgatcgggtgcatcgttgtactccacttcgctgagcatgacgcctatcgcgacaatgccggctttgatttgcaaactgcaatgcaacgctgattgatcaggcgttttctctacattttttttcaccttccaaaccatgtgaacattctactccagagaacggttggcaggcagatcatagggatatcgtgcagttgttttaccccgaactcatcgacccctcctcgacctctctgccgcccgagcataccgccggagttccgcgtgggtgcaaggacggtggcgtggcgggtccctttctcatccatccaaggcttaacacggtgatgacggagctcctgtggatctgatgctcttttcttcggaagtcgcctggatctagcatgttgataggagctcgccggctaggagcatggtggtgtggcattgtgggaatcgacgtctagaagcatagtcgtgtggcatatcgtttgggggtattgttcgctcgctcaatggcacggcagtccggttagggcgactggcacgaccccccaaccccccccccccccccccccacacccgtcgcaccggatttggtgaaggcgatggagaaggcaccccgcggtggcgtgcgtgcggtttctctaatgcagaagagttggctaatgccggcaaatagacacatgaagaggccactaatgaggttgcgagaaagggtgcttagataggtggtagtgatgcctcgcggagaagtatggagaggcagttggaggggaggcacatattcgataggccatgcacaacctgaacatgctaaggacatcacgacgaacatcttggcataggcgaaagatggggcgtgaatggagatagcgggagttataggtgacagcggtacccgagtggccaactatggctcgatggcagtaacctaagacgatggcggtgccagtggcatccaaggtatatgaatctggcctgatggctagatctaaagctctccaattgataaaaggtggctacgctaagaagggaagatagtggttccttatagcaaggctaataatacagccgacctgctggctataaggttctttatagccttctctcagcctatccatataatagttagctcttcataattaatacagggcccacttgtctctctcacagagtttcttggttcttatatccaagccggctgttagtttacagcccgcttctcctctctctcttctcttcttttctccaactcagcatttagctggcttatagcctactattatacttgctcttagcaatgtcgatgataacaaggatggctagatcaggcctaatggacggattcagtatacttctggaatacaaggcggctacaaggagagaaggcatcgacaagatatcgacgagctaattggaaattctggtgaccgagagggtgcgatgctgaatcttgggtctaaagagcaggtacaatagcagactattagccagctataaacataatttaatgagataaaagatgagagagaagagcagcaggctacagatctgtagccagctgcagcacggactccaagacgtaatgtgtgtatgacaggtgggaccatatattaatactccatccgtcccaaaatataacaacttttagcacttaggatttgtctcaaaatataacaacctctcaaccaacattcatttcacaaccaatcacaaccctttaccattcacttttcttacctacctccacttctcaaccaatcacaacccctttctatttaattataggaaaaagtacgaattaccccctcgaactaacgcagtcgtccgaattacccccctgaactacaaaaccggacattcttcacccccaactatgtaaacaggacgaattaccccccctcgacccaatccgtggtggttttggtctacgtggcgtacgcgtggcagtccagtcagcaacttatttattaaaaaataggtgggccccacctgtcagtttttctctctcttctctctcttctatccctcactctctttctctcttctccttcagtgttcaaacggcgacggcggaggcagcggcgaggtgaggcgaggcggcagccgccgggaggctgcgcgccgcggccgcgtcgacctcgggggcctcccggtggatagcggcggcgcgagacgagggagcggcggacgggcggacggcagcgcgcggggccgggcggtgggcaggcggtggcgcgagacgagtgggcgggcgctggacggcggatggctgcatgcagcggcggaggcgtcggtggatggcggcggcacgagacgagggagcggcggacgggcggacggcggcgtgcgaggcaaggcggtgggcagcggtgagagacgaggcggcggcgcgagacgagggggcgggcgctggacggcggacggctacatgcggcgacggcgagtacaaccaccgccgcctcgtccactcccgcggcggcgccgccgccgccatggccagaatcccgaggttcctcttcgccaccatcccggacggcctaccgaagtccgacgccgacgccaccatgactacctgcctcccctacttcaggaagctgctcgccgacctcaacaaccgtgccgccggcgatgacgacgacgacgccgtgccaccggtcacctgtgtcgtggccgaccacctcttgggcttcagcctcgacgccaccgtcgccgtgctcgcctcgcgctgccgcccactgcccacccttgcatgccgccttccaccgccccgcccccgcctcgcctcacgcctccgcccaccacccgcccgccgccgccgctcgcgctaccgcccatgcgcgccgcgtgagagagaggaataggacgacccgaggcccgccaccccggtcctcacctcgccattggaccccagcgagcttgtcccggagaaagcctacctcgcctcgtcccttctccgccgcctcgcctcctccgccgccgcctcgcctcgccgccgccaccacctcacctcgccgtcgccgccgccgcctcgcctcgcctcgccactgcccgcgctcgttgcctccatcgtcgcccctctgccgccaccaccgctggacctggaggaagaaggggaaaggaaggggaggagcggctgcggcgaggggggagcaaaccgcgagccacgggccgccgcctccggcgacgccgcgctcgcctcgcgctgccgcccgcccccgcctcgcagcgcgccgcccaccgccgctcgtgctgccgctcatgcgcaccccgagagagagagaatgagtgaagagagagagaggaagaggggaagggtatgtatgacatatgggtcccacaatttttttaaaaaaaatgctgaccggattgccacgcgtacgccacataggacaaaaccgctctggattgggtcgaggggggtaattcgtccagtattaaaagttcagggtgagcaatgtccggtgtttgggttcaggggggtaattcagacgaccgcgatagttcaggggggtaattcgtactttttccttaattatatctacctttttaatagtcgtgcccaactcgaaaactctctatattctgggacagagggagtagtatagtaagcaactattgtatgaattggctattagaacgactatagatgaattgaagctagtaatgggctatactattaaacttgctctaagggtctctggatctcagttggatcgtgtccgaatatacttgtaccactactagtagtagctgttaagtgttagggcaaccacaatgtatgaaaaaagtgaccttaaggcaatgattacacttgtaaagtgagccatatacattgtgtaaagtagcattagcttagagtgcaccttatatttaaggtctaccacaagcaaaaagaaaatattttctctctcattcacttcatgatcaagagatgaaacaattatttttccattctatgtgggttcatcttgtgactaaattctaaccatagcattgtgggtattggctttaaggacatccacaatgtggtgcaaaagtagtccataagcaatagaatattccattcagccatctattaccattgtgcaactagtccatatagaaaaaataacaaaaggtatccatatgcatatggactacccatatggaataaattatattatctatctctactcctctctcttctcctaatgataccttgtatacatatacattgtggagattgttataggtaaaaactatttacgtgggtcacatctatatggatcactttgcaatatacattggtgataccctaacaatgattcacaattcatagagcccaccttaagattacactacatatggcggttgctgttgcttgcccctaccagatacctagtcctagcatgcagatcttgttatcgcacagtcgcatagtattgaccgctgcaggctacgcgtcaaagctcctttgacctgccaatcgccggggccgctgatggtcggattatgcggcacgttcatgtcagggcaaactgctgactcggtatgttcatgttacggtggacaatcatcaggtaacctaactgatgtccagtatgcctcatagccttcactgttgccacattggagattttggagcattggcgaaaaggcaagtggactaaactgtgggccattttcttcatcacctttgttttggggcaaaatggtgtataacgccgtcgaagtataatgacagggctgaatgtgttcttatgcacgatatgttccttctgttaaatacttcccgtttcatattataagactttctagtattatccatatttatatatatattaatgaatctacacatgtctggattcattaacatctatatgaatgtaggcaatgctaaaaagtcttgtaacctgaaacggatgtagtaacatgtaggagtattttactacttctttgttttcaccaaaactccaaaacgtaccaaaaaaatatcttccaatgtgaaggcaaaacataccctgttgtctgttgacgatgagaacggtttgtccacctttacactgttgaacggtgagcaataacaccaacaggaagttgattttagttcccgtgtcaatgaatgcaatgatgcatccacgacccatgcatcttgcttggttgtacagaactccgctctgcaacatgtaaagttcaacctgcagaccaaccatgttgttcaacagtagccctgtacaagcagtcaaccacaggtagcacgttatgttcaggccttcaggccaattctgcgtgggaaaaaaaagaagcaaaattaaaaatataagggccaccacgcatgacgcatgaatgccatattatcatattatgatactgaaactctcatgcttgaagggaaattgctgattgataagtacattctaagactgcccccaatatttcttaagtcagaaatcaaagagaagcgtggttttcgtaaactacagaatatgagctatctcgcaaactccagaaagaaactaccaagcagaacaactggagcacacaattatattatactccctccgtttcagattgtaaaactttttagcgttactcatattaatttagaagttaatgaatctagacacatatatatgtctagattaattaacatctatatgaatatagacaatgctagaaagtcttacattgtgaaacggaggaattataagcctaactttgacaccaaaatctatgaacgaaaaattaacagcaggtgcactcgttatttccttaatattggcagcacaatgcttcgtgccagcagtgaccagttacccatttgctacccagcaaccaaataacctgcaaaacataagaatgaacatgcagatgtccatggcagcatttgtgttcccatcggccgtttgcaaccaatcacatgtttcttttaatcaaaaccaatgatatgcttaacaaaaaccaacactcagctccttatacaaagaaaaccataccaagaaaagagacgacttcagtacaccacaaaatcacaggaaaaagcagttattgatcacccccccccccccccaacacacacaccaaaaaaaaaaactcagtcattaaaaccaacagtctctactagcaaaaagcaagatacatatgccaatatgcaacctccataatataatgatggacatcttttctttttctttttgctttgtttgaggaattgggtttgccatctataccctattattggaaactaacaactcactagcacatgatttttttaattattttttagacttttatttttaaattttatgaatagaccattccaaaaagtatttccaaatctgaaccttttggccacgccaccatggttggcgtggctaaacaacgcaatatttttggaatggtctattaataaaattaaaaaataaaaaaaatcccaccacattaggctaagatcagcatacctagccagtttgatcatttgcagttgcaaactttgcagattgttggatttcttttatcgtccctctacctgtgcagatgtagagatgctcagatgccctatctgtcttctttagcagcgcatcaacatgatcggctcctgggaatatcaatattgacttggccaaatcaatgactactggagctctgtggccttgcaatactcgcactccaaatacaccgaccttcaggctaatggccaggcatggtgcagtggcggtagattgagattttcttgacactgtggccagtactttcctgatttagcatacttgaggtttcaagcattgaaccttttctcatccgcaggacatcaatgcttctaatgttcaggcattggtgcataagagggcatggcttccaagcattctcatgtgaaattatgcagtaatgtttttaaaaaaagtatgttttatgttttctcctccagggtgaaaacacatcttgcaattgtttgctaatctattgatctcttctatctgaattccagctatagatggccatgtgggccgcccggcacggcacggcccaggcccggccgtgcctgggccgaggcttgtcgggccggcacggcccgaccgacgcaccgggccgtgccgtgccagcccacgtgccgcactcacagcccaggcacggcccaacacgcctcgggccgtgccgggccggcccgaaggcacgatgggccatcgtgcttttcctcagaataagtctaaattttctccctcctattgggctatgacattgtatagctaaaaaaagtctattttacctccctcttctttgtgatgtggtatataaatagctaaaataagtctatttaaggtccctattctttagacattgacatttatatgtctatttttagtccctatactttgtgtatcgggtctggcctgccagcccatcgtgccaggccagcccgaccgtgccgggccagcccagcgtgctggtgaggaggcccaggcacggcccgacggtcgggccgggccggcacgggcccgacccaagtcgggccgtgccgtgcttgggccgggccaaaaaggcgtgccgtgggccgggccttcgggcctcgggccttatggccaactataattccagcagatgctgcaagaataccatcaaagaaagttgacaacaaatgatcagaacctgacagtggcagttctttttagataacaagtttgcatctcaaaaacatgcttgaaggtccttaccagtcaccataaatcatttggtacacagctttggaacctatcattccaaactgcaattgcactagtagagataaagaaaaaatctctgtaggagcccgctcaaagactgaaacaaaagataaaaccaagaacactaactgttatactcaaacaattgagtgaatttcatgttcagactcagaatacataccaataatcaagtgatatttgcagttggactcatcataggaccacctatgagtacttttaaaactgatatggtgctctgaaggcaagaattcacttctgtaactaagcctcaggatgaacataatctcaaatgtttcgagaacatcaaatgtcaattacagtcttatttctcgttgcaaacgtctatatttctcttgcattctcaagagtttccgtgaaagctcctgattccctgtcagcatcaacccgttcaacacacggttgaacatgaaccttctaggcagataacctctatccaccatttcttccaccatccttgcagccagtaccatgtcctcagccctcttgcgcataaacatagcacttattatgatgttgtatgtgtcttggttgggcaggcactcctctcctttactcatcttctcaaacaaatccaaacccttttccatctccccttcctcaaataaataccttataagaacattgtatgtctgaacgatgggttcgcagcctccattcttcatcctctccaacagcttcaaacctcggtcaatcttcccagcatggcagaggcctcggatcaacacagtgtatgtaaccacgttagggacatagcccttaacacgcataccatcaaacaccgttactgcatcctccacattacccttcttgcagatcacctgaataagcgcattgtaggtagcaaccgatggagcacacccttctttagccatttcatcaaacaccttgcgagctttctccagctgcccggcaacacccagcccatgaaccatggtagtgtacgagacgacgtcgggcttacagctctcgtctttactccccctcttcttcatctggaggaagaagtcccatgcgtgccgtagctgtccagcacggaagaagcctttaaggatgatgttataggtggtcttcgtgggggcaataccggactcgaccatcagccgcagcacgtcgagcgcgcgggaggtgtccttgacgcggcaccatccgtcggcgagcgtgttgtacgtcaccacgtcgggggtgaagcgctgctcaagagcgcggacgagggaggcggccttgccggcgtggcgcgacttggacagagcgtcgaggagggagttgaacagggggaggtcctgcgcgacgcggtgggagcggtggagcgagaggaagaggcggacggcgaggtcggggcggcgctgcgacacggcgaggcgctcgaagaggatggggaaggtgcgcggggtgaaggcgaggcggtggcgcgggaagaggccgaggatggagttggtgagctggcgcgggcggcggaggcgcgcggagaggtcgagcgcgaggtcgagcgtggagggacccacggcgtgcgcgcgcggcgggaggtggaggagcgagtggaagaagaggagcgcgcgcggcgcgtggtgccagaggagcttgaggacggagtcggccacgggggtcgggagcgacggcgcgacggcgaggagggacgccgagagggagcgcgtcgaggccggcgtgagggcggacgaagggtggttcagcacgacggcggcgatctggcgagggcacggagctggtgcggccgaggtcggtgtcggcggtgggcggggcagcggcggcattggagagcttcgtgccgttcggcggcgttgcgacttgccaggaagaggggatcggttcgtggaaggaacaaacgtgcagtgtgcattgccgtatcgcatggtatgggccgaataattcacagcccggagatgctacggcctatcgggtatcggcctatgaggcccagaggcccatctccaaacgagatgaacccgccatggcaaaacgtggccttcttgtcatatggatccttgcgagctgtcaagtgaactgggaaaaagtacacccaaggtccctcaacttgtcatcgagatacaaaatcgtcccccaatcgcaaaaccagataccggcatccctcaactaacaaaaccgttccctcggtggttttgacaccggttttgtccgacgtggcagctgagtcagcgtgggaaccacgtgggccccacatgtcagacaatccacatcagcctctctctttccctattctctccctcctctctctctcactcttctcttctcttctcttctcttctggggcggcggctggggcgacgaggcggcaagccggccggcggctgaggcagacgatgccggggagaggcgagagagtaggcggcgggcgacaaggcggcggcggcggctgcgacgcgggagaaagcgagggcggcggccggtcgcgaatggcgtcaatgaagctgcgtcgccgccggcggcgaagcggccccgcgcgggcgggcgccgcggcgtcgggcaccgccgcggcgcgggcgcggaagcgactcgttgtccacctcccacttagggagatccaggcgaggctcccggcgaaggaggcggcggtgcgcccgatccgcgccccgcgggacgcgctcgagggcgtcggggagtacgtcgaccgcgccgtgaggccggccgccgccgtgcacagcctcgagccgccgctcctcgcggcgggctgtgccgccgctcctcgcggcctccgccgtcgccgacgacctccccggatacctcgccgtgatgtcccgcttcaaggaggcgctccacttcctctccgacaactgcggcatcgcctcccagtggctcgctgacatcgtcaagtacctcgaggaccgtagcctcgccgccgccctcgccttctcccgcctcgcagccgccgccgccgcctcgtcgcctgccgcctcctcctctcccgcctcgccccggcagcctcgtggaaggagcagccatcggcgcggggccagtcggcgtcctcggcgaggtggcgccgcagctcctccttcctctcccgacgcttttccccggcggcagcaaccggagagtaggtcccagcggtggtggtggcggcggcgagcgcggccgcgtcggccttccttcgcggagccactttcagtggagcgatttggggaagggttggagacatgagtggctaggagtagccggcaagcaccaccactccgtgccggccctactcccccgtcggcatcgccgtgatgctcagcagcggcgtcgccctcgatgcggccgtcacctgccacgaaaagtacgggcacgtctgggaggtgagcgcggccatggcgggcgggcccgtacgtcgtcgtcgcgcatcacggcggcgtcggcgggacgggagaaagaagaggcggcgacgacacgatgacggtgaggcggcagcgcgggcaggtggagtgggaaccgagccacatgtcgacgcactcggcgtggaagccgtggccgcaccgggggaggaacctggcctcgtcgccctcctcgagctccgcgaggcacaccgcgcactcgatgctgtcgtcctcctccttcaccgccgccgccgccgccgccatgctgtggctgtacaccgtgaccagcagcgaccgcagcacctccgggtcgacccctcctccccttccaccttccccgctgctcccagagcgtcgccgctgcggccgcccccgccgcccatgcccgctggagaaaagtgaagagagagaaagaggagaaagggagaggaagggaaagagagagagggagtgacgacgtggcatgctgacaggtgagtccatggtgactcagctgccacatagaccaaaaccagagttaaaaccaccgaaggatctcgggtgatcggttttctatagttgagggacctcatgtatctggttttgcggtttgaggacgttttcggatctcggtgacaagttcagggacctccggtgcactttttccagtgaactgcgaatctgtgatgactgacgagcgatgctggatgattatggtccattgcatccatgctccaaaatctatttttgaagcaagcataccaaaattcgataatgacatttgcatgcactaacgaaccaggtttagatatatactagtactcatcatgtctacaggtttcagaataaagtcttttgactaaagcaatgtgtccgttatccaatcaagaggacctcaggccacaagacatgaaaaagaacatcaagtgtgtcccacggaaaggacagaaaaatgtctggatcttatatatactccgtagattctagtagtagtgtgctttaagagcaaggtcaatagtatagtctgctgctggctccattatctccatatcattttatagctaatattacagttaactaatacaatagactagctattgtgcttactacatctcatgaaagaaatatttaattatacatgcacatactttatgagtacttacagtgtatgatcaaaagtgaacttcatgtttgtggccattcatgttctgaaacatgagttcttatgtctacatgaatagaattgaatggaagctatcgaaaatcagatggagcgaggtaaaaaagaatacactcagcggcgaaaaaatacacggaaacaaaatccgctttttgtaaacaagatacgcatacatctgagatcaggcagaaatagagaaaaaaccaagaaaagaaaaccaaatccactggtacggaggacatcagaactactgaaccactccctagccgattgtttgttttaatcaacgaaatcacccacaagacagcaagatttaggctctgtttctttcagcttaggattattataatctagattattgagtcagattactataagctagattgttataatctgtagtaaaataagcggttagttgtttatttcctagattattgggtttgcaagtctaaagaggaagtggggtggcatgatgggtaattttttacccaataatttggaaaaagctcacctaaatgagcttatcagattataataagctgggttccagattataataagctacttcaataagttgtctgtttctttcagtttactctcataatctggattataataatctcaagttgaaagaaacagggtcttagcatggagacaacgccagcttcatgcggtgggcgtcgatcaagcgaccggcgcagatctagcacacagtggtgtcgcccggaggctggaaactgggatcagtcttttaatgaacggaagagagtgccgacgctttcagatggccttcatctgcacgccgcggcgaacggtggcaccgacggcgatgctaggaagaagcgtcgctgcatcggagaagatatggaggaggaagaggagagcgattccgcgtgcttgatctgaacctgtgttgcgcagttgcactgctcggcaatgggaaatactacttgggcggaaggagaaggagagcaaaccacacgggatcggatggggtggtgtggggcccaaaaaatgtatttttaatcgctagtactagttgcatgcgcatatggagccgtgctatcgtcggcgctagattagtcgtccgttcccttcctttttctggtttatctttcctccacgtagaaatacgatgatatgtaactttttgaagcctgttgagttattttattgtaccggctctaagcgcaaggatctcgtcctcgcgggtggtcacatcctcacggtcacggacaccaattgacacccaataattccatggcaaagtgccaaagtagaaacatgagcgagtacaagcatgtgggtgatgagaggtacatctgatgtaaagattagacgaatgaaaaaccgagagcaggtttgttccggggaaaccagctactggtgtgaatgcccgtacctgaatgctagtaataactaggaataaacagacagaatttggtttctttctttagataaagaaattgcttgcttgatcaagagaacagaccagggattggaagctcgctgcacgggtccaacagcaaatcagtatccatgcttatcaggttcggaaatttgtctggagctcattcctgacgatctttgaagtagtattagtactagtttcagactctcaggaaacatttgtcaagtaaaggaagatttgctacatcaaatttgatggtttgagtatgagctcaagacagcttcacgcgcgagtgtacgcctgtacgtacatgtacaatggctaatgcacacactcaagtcaaaagtttaaggggctgtccgtttggcgtctacggaccaacggatttaaaaagctggttaaccaatacacttttaaccggtagttcatcacggcaccaagaatcaacgtgtattattgacttgcaagaacagaaaaatatcgacatgtactaatctgcaagtccgaccttccaggacgatgtgcagtgttcctcacgaaaattcgacgagcaccatcatccgattgattgaaaaactggtttgcatctaatcataagccgtgcaattattgtcaccccgatggtacgagcattacggaatgtattcacacctgccattggctgtaacaactgcaccatttcatgaaaaaaaagagttcattttcttctccatcttactacagtggcttctgttgtttattccattactctgttttttttttcaaatgtatcttcgattggtcacctaaggcagacgagagggcccaaaaatgatcgatcgcatgattaggacgccggcagatggggattaaacggtgggcttgtttttttagagccgaagacagcgaagtttaaagaggcagtcaagcaaaccagcgaggcagcgaagcgggcttaagcttaagccacctctcgtcacgcctccaaacccacttctctcccaccaccgagaccgccgcctattctttccttcctccctctctccggtctttgcttctcgcgaggaagttggcatcctagatacatactccttccatggcgccgtcccagatccgcttcggccaccagatccccttctcccgccccgactccgacgaggaggaagaggaggacgacgaggacgaggaggtggaggaggaggaggaggaggaggaggaagaggagtacgaaggggaggaggaggagatggagggcgaggtgccggtgtcatcgccgctgatgctgccggcggcgaggggaggaggaggaggaggggtgtccgtcgtggagacggtggcggcggcgctgcggaggtcgctgctgctgtgcagcagcgtgcgcgccgcggaggacgaaggggccgcggcggcggcggcggctgctgcggggatgcagattggccggcccaccgacgtgcggcacgtctcgcacgtcaccttcgaccgcttcgtggggttcctcggcctccccgccgacctcgagcccgacgtgccccgccccgcgcctagcgccaggtcagtgccgcgccattgccttgcttcgccttctccatgctccgtggatttgaggcgggggctctggaattggagttccgctccggagatcagcatctgcggtgctactacctgtgtggattaagcccattttcaccctgcactgctgttcgtttccgaattaagttcatggcatgatgctaaatatagtgccacattgccgcgtaactaagcaaaagtgcacacagaatagttgcctcgccgagcccttattaccgattcggaattggttacccacgagcgacgagccaataggactgttacgtttgcaaactcttacaggaagccagaactgttgccatttccaaggatggcactgccaagttcgactactggggaatcttgtaaagcacattccttttgtggagatgactctctttgtccttgtcaggcattgggatgttgtgatatattcctcagtcccaaaatataagcacttttagcatttgaaatttatgccaaaatataattaattttagcactatttagaatactgcttgtcccatctatcactgttttaattttactatcttactctcaaccatccgttggggcaccaaagtcttttttccgaacaggcaagggcgctccatatgtttcatcttttgtagttagttgttaccccttactgattcctatcctggtattgttgtatgtatgatacataacctttcagttgtagaggggaactaaggatcatttctgtttcttaagttcaattgttataagttcttttccttaaaagaactttgcagcctacctttattagtgaatttctagcaaagctcagaccctaacttagtttatgtttaatctatttccttacacagtgtgagtgtatttggagtttcaccaacgtccatgcaatgctcatacgataacagaggaaacagtgtgccaacaatactattgaccatgcaaaagaagttatatcaacttggggggcttcaggtaaggccaaatggccaacaaattttggaaccttaataatactagcatttacactactcagcaaaaaatggaaaaaagttctgaaattctgcttcttgttttcccaggctgaaggaatcttcagaataaatgcagacaatagtcaggaactacatgtcagggagcaactaaacatgggtgttgttccggatggtgttgacatgcactgtctgacgggcctcataaaggtgtggtgacaattatttcttgtgcttttaattaacctttgatttatttaccatatgttttaaatgcataaaacccaaccttatggaaatctttctctatggaaattgaacatgtacaaagccttcaaatatgataatgcagacattgtttatgcagtacagagatttagatataagatttcagacagtaatcaatagatagactagactctagagtatctagcgcatacatagactaaattatatttttaagaagtctacagaaaaatgagtttttgtattgttactttttatctgtttgttctcttctacaccattccatgaccggtgtgatgctgatggtaggcatggtttcgtgaacttccaagtggagtattggactcattgactccagaacaagtgatgcactgcaacactgaagaagaatgcgctctccttgcgagtactctacctccagtggaagcagcactacttgattgggccatcaatctgatggcagatgttgtggaacatgaaaactacaataagatgaacgctcgcaacattgctatggtttttgcaccaaacatgactcaggttattctcaaaatctatttggctttatttattttttcttgctatctacagaatttgctatttcacagactaatcatgtaacataccatctcttttatagatggccgatcccttgactgctttgatacatgcagttcaagtgatgaattttctcaagacacttatcttgaagactgtgaagggacgggaagaaacagctatgccatcaagtgcattcccatcaagctctggttccccaagtgacaaagatgaacctcaggcattagagcatttggacaagcccaccatttgttcaactcagcaaaataatgattttccaatgattagtggggctactcttgatcacttcctctttagagcagaaccattgcgtcataatgacgcacaaggtagtgctggacgacccaagaaacgcgacaataaggaccatgacaacagcagcagggaattttctcccatagatagtgattcaagtagccaagccagcaattctgcaagcaaattcagtaatgacaatgtggaaggtttatttgacagatttaaatttcggaaaggagtagggaggctgtgcagacaccctgtttttcagttgagtaggtccatgaaaaaatcaggtgaagcgggacaagcctgtgtatgaagtaatgacacgatagggtgtagttgatagtttccattatttttagaggcatgtttacttaacatttcatcaaccattgtcctagatttcgtgagtagaactgtagaaggtattagccaatttggtggtagtagtactgaactactgatgtcgagttcctgcctgtatatttcaactattcatttctgaccaatcaacttgtacgatgccatcattactttcggttgttagttatacttgttactaacagaaatcaagagtagccttagcccctttccaatcaattgctgtgcaagtgatttgaatgggacaggtacaaaacgccatcatcttcagtactccagttttgtggtgctggtaagcgctatcatcttggtttgaagctagtatcattttgatttgagcccctaccaaaatatttagcactatcaaaaatggtctggtctgaaaccaaaatgtgcccacaagacaaatgccaagcaataacaaaattttggtagggtaacatttcattgggttttagtacgggcagaatttggtagacttcaattcaatacggcccgaagatagcagggcagatgtctaatcaaacgttgctcagtttttcagggcatgtttggttcgtgccaaaccttggacaagttttggcttttttgggtagggaagagtaatatcaagttatcaactatattgatcttggcaaaaattggtatcaatccaaatgacttttatatacactattaaagttgccaaaataattttcggagcaacccattggcttcggttttgggcacaactacaaatgtgtgaagatgatgaagagtttctgaaagttgcatatcgaaagttggagactatggttatacaactttttgccaattatggttggagatttacaaatagacttcaataattgtaatctccttatgttaggctagattctttattgttccttgcggtgtgttctattcaattagatttacactatgttcgtcaaacgcttctatgtaataattggctgtaactcttttgagtaaaaaccgggatgttatattccattatctaaaaaaaattaaagttgccaaataattgttggggcaaaatttggaaccaaaccaaacaggccttcagtctttcacccgttggactgccgcattgaggaggcgttttgcgggccgtcgggccgagagagagagagacatacaactccaaacttcacgggcccttatggatcttgtaaactttgcctcgaaatgaattcttgtgtttagactggtatgtcgaagtgaatggtttacttcaagtatgaaaaaattgaaaattaaagaaaaaaaaagtacgaattcccccccccccctcctcgaactatcgcggtcgtccgaattactcccctgaaccacaaaaccggacattcttcatccctaactatgcaaaccagatgaattaccccccttaatccaatccacggtggtttttgtctacgtagcgtatacgtggcagtccagtcagcattctaattataaaaaaaaagtgggacccatctgtcatattctcttctactgttcctctctctcactcttcctctcctctctctctcttctctgtctcactcttcccctctctctcacacgcacggcggcaggcggggacacgaaggggcggcggcggcgcgcacgcacgcggacggggccggaggtggcggcgaggacggggacgtggccgagacgcgcacggcggcgaggacggcagcacgcacggcgcagcggcgcgcacgcatgcagacaggggcggcggcggcgaggatggcggcatgcacggcgctgcagcgcgcacggcggcgcgcgcgcggcaatcaaacaatgaagagttcacgccgacgacaaaacaaagcaatcaaactgcaggtctgcaggacattgacaaatcacaaaaatctttctattctagcggctaaaagaattgctactttgtcggggattttgtaccaagggggaaatcaagaagcggcggtggtgtgatcgaatcgatcctcaaaggaaggtggttccggcgaagccgcggtggaggaggttgtgggcgatgttgtccctgttgcgcttggcggcctcggagcggacgggggtctccggcaaggtctcgtcgttgacgagctcgtaccggagctacggctcgagctcctcgccgcgcgtctcgcagatgttgtggaggacgcagcaggtgccgagcacgacggggaggtcctggagcttcacctccgtgcgcttctggaggcacgcccaccgcgccttgagcgcgcgaacgcgtcgacggcgacgcgccggaggtcgcccaccctctcgttgaaggcgtagatggggcggcgcgtcgaggaggacaagagcgctcggggcagagggaggtcgaggcctcgagcctgcggccgcgtgcgtgccgccgtcctcgccgccgccgcccctgtccgcatgcgtgcgcgccgccgcgccgtgcgtgctgccgtcctcgccgccgcctccggccccgtccgcgtgcgtgcgcgccgccgctgccccttcgtgtcccccgcctgccgccatgcgtgtgagagagagaggggaagagtgagacagagaagagagacaggagaggaagagtgagagagaggaatagtggaattgaatatgacaggtgggtctaactttttttttataattagaatgctgactggactgcaggtatatgccacgtagaccaaaaccaccgtggattggatcgagagggtaattcatcctgtttgtatagttgggggtgaagaatgtccggttttatggtttaggggggtaattcggacgaccgcgatagttgggcggtaattcgtacttttttccaaaattaaatgcagtttgagatgtgatactcatacaaaccagcgttccttcagtcttaggagatgatgggcatgattagcttgaaacagattgcactagcgaaattcttttctttcccttccaattctagtttagacttctaacgatgaacgtttcaatcaaccaacagccaagtggaccctcaagaatattgttagcaatcttggtacgatctagctgatatgccttggaagcttcctgctacgtaaatgtacaacatgggtgcgtatcttcaatccaccaaaacaataatagtacgtgtgacgatctttttgtcccaaacactcaaacagcccatgttgaagctgttggctctggtccttttctgttttggattgaatcaactacctctttttctctaccaaaaaactgaatcgtgtgtgcccgtggggtgtggagttaggctctcacgatcaataccgtcattcagagcagagcccagctgtctcgggctctcggccccgtacaattatccacacgcgcccgccatcgacctcaccatgcgatccttaactttgtcattttcgggaacgcattatgcatgtacttggaacactactgtactagtttctcacattttgttgcctaacttaagaagctcctccatttactctacacatgcccgtgttcattcatgcaaacagaaacgaccgcagcgaaggaaactcccgcgcagatcaggctccgccactgtaactttcactaagaattaccattgatgttcgaaaaatagttgataatcaaagaaacgttattagccgttcgactcaaccatgttattggctctgctgctgcacaacagaacagagcatttaccaagtcaaatcatggccagtcgtggacttgaaagtacgccacattttcgcgctgcccttaacttatcaaatctcagagactacctacaaacttccgaaaacgacggcagaattccagcagaatgcatgcacagcaattaacagcctaacagaagacgcgcgtccggaaatcaccctgccgtgcacggcaaacaccaaacggaaatgcatcagcgatgccccgagctgaccagctacgccaaacgccaaaacggtataccccgaaattgcagttgcaaggagccagggaccaatggaccatcagcccatcgcgagaagttaatggtgctactgtactatccaacacgtagttaattgtaaacactgtactaagcagtatacattttgcagacaggacaatacattatacaaccatacagtcatacagatacagatcagtagctttgcaacaagagaaaatcttgtgcatgcgacagcctgttttgactgccttttgttttatattgggtgaggaatcatttgacggcccgggttgtgttctgtgcaacgagacaatcccggcattgatcccttttttcccctggattttaaccgtgtgcaatttgggaggaccacgcacttgcggtgcacgcttgccatctccgttgctttataagcttgcagcgcgcgagccaacgagagaaaccggaagtctcttttgaggttgcaacgcacgcacagtttgcatccgcagcttagctagcgagtgacgagatcacagggcatgatgagtcctggcgtttcggccaagaagcgccacgccggcgcggggttcacgctcggctgcggctgcaaggacgcgaagagcgtgtccgtctcggcatcggcggcggggacgccgtcgacaacggcgacgcggcgcaggagcgccgggacgaacccgtcggggtcgacgacgacggacactcttaccatgacgtccgcgtcgtcgtccttcctctgggagcactccgtggtggagttcgaccacgacggcggcggcggctgcgggccggagagcttctccggccttctgcgcgagctcagcgagctggagcagagcgtcgcgtcgtggggccggaagagccaccaccagcaccacgacaagaaacactcgccggcgccgtcgtcgccgctgccgccacaggaggacaggaaggagaagaacggcggcaacggcgatgccacggacaaaccaggagactgccgcgacggcggcggcggcggcgacggcgtcggtgtggctctcgacggcagcgtggcggtggtgaagcagtccgacgacccgctgggcgacttccggcagtcgatgctgcagatgatcgtggagaacgggatcgtcgccggcgaggacctccgcgagatgctccgccgcttcctcaccctcaacgcgccgcaccaccacgacgtcatcctccgcgccttcgccgagatctgggacggcgtgttcgcggctactgcctccctcgtccaccaccaccacccgcccccctcctcacgccgcgagccggtggctccggcggcaaggccgcccgcgccgaggacgcctccgcgccaccgccacccttcaccacgggcatggcgcgtgtaatcgtaacgcgtacgtgcaacgctcgcacgcgcgctgtgtaatcacccgcgatgtgggttactccggggcaatacacaagtactgctactcgatatcaaattggagattagtccggtgacaccgtgcgtgcgtctctgtgctttcgcgcgtcctcgcattttgtctcgtgtcatttatcttgcggtgtgtgtggtacactggttactggtacaaatcatgaagccgaaaagagaaggacgggggcaaagcggcaacggcgtacgaaggttaggaccggccggttcgggggccggagtcacggacgatacgggcgcgcgagttggaggggccccgacgcgcgggcttgcacgtacgcatgcgggtggatcggcggtgggtggttggcgcgcgcaggcggcaacgacgcgagcgagggccgagggagtgggactgtgggagtgggaaggcaaggcatccacctcgtcctcgatgtcatgcgtgcttgtcattccgcgtccatcagcagcagcccatcacgggcactgaattctgatgtccctttcaggtaacatgtacgggttcccgattcgccgtcctccgacccgggcggtggttgcttgtcagactcctacactgcaacaaaattaaccgcaagctgtagacgaatggctatattggaacaatggaactggctgtgtggtaaagtgtggcgaaacaatcatcacgaactgacgggagaatggatccaggggaaatatttttattttagttcttttttaaaaggggatacgacggaatcccgttttcgaacgggatgatcccgagtaggtatcaggtgtgatacctatcaggtatcagacgattctacacacgtttcaggtgatacttgcaaagtatcatgtgatacttatcaggaatcatgcgatttctaccacgtatcgtgtgatactcgcgaggtttcatgtgatacctgtcaggtatcagacgatttctacctcgtatcgcgtgatactcgcgaggtatcatgtcaggtatcagacgatttctgctatgtatcgcgtgatacttacgaggtatcggatgatacttaccaggtatcaggtgatccctagtagatataactgtacatcccgttggggagagcatcccgacgcggccggccacctacagccgtcccctgtagacgaggacggcgacggcggcagcggcggtgggtgcgggcacggcggcgacggcgggggacgggcgcggcagcggtgggggacggggatggtggcggcgggggacgagcgcggcggcggcggcggcgggtgcgggcgcggcggcgacgggcgtggcggcggcgggggacggggacagcggcggcggtagggaacggggacggcggcggcgggggacgggcgcgcgctgatggcttcggccgtgtcgcatgggtgagaatcgcgtttgtgggggaaaagcatcccgttgggaaacggtatcccatcccctagcattcccgtttttaaagccttattttataaatagatccttaggaaaaccttattctagaattgaatccttatggtgatgttagcatccctcttgttcctaagaaaactaaatcattgatgtaaaatgatcgacgcaaatgacactaacgtcaaggggatggtatcatcatattgtccatcatgttaaaccacggcgttaatgacgttggtgccgcgaaaggcatatatttatgtaaataagaagttaagtaaagtctatcaccggtccctaaacttgtaccactgtatcatcccgatccctaaactcgcaaatcgaccgttcagattctcaaacttgtttgactgtgtcatcccggtccctaaacttgcagatcactcgtttaggacctccaacttgttcagttgtgtcaccctggtccctaaacaggacagtctaaaaactttatatcaaaaaataattcataactttttcatgtgaactctaatgaagacaaactttatatcaaaattgtagcccacgacgcgacctacaactttgtagttgaaaagtttttgaattaaaactgtttagggtcccaaaatattgttgcatgtttatagattttgaaattttaattttaaaataacatattgggacaaaaaaaatgacttaaaataaaaaaaattcaactacaaagttgtagatcgcgtcgagggctacaagtttgatataaagtttgtcttcattagagttcacatgaaaaagttataaattatttttaaatataaagtcttttagaccgtcctatttggtccagatgatatacaaatccaagtttagaaactggtgtgacacaactgaataagttggaggacctaaacgagtgatctgcaagtttagggattgggatgacacagtcgaacaagtttgagatctgaacggtcgatttgcgagtttagagactgggataacacaacggtaaaagtttagggaccggtgatggactttactctaagaagtttttctagaggtttattagtaaaatatttttctaaaaaaaataaaaatcctgatggatcgatctctcacctgacgatcaaccacacgtatcatatccccgccgattcaggaactgaacatgagaacttgggcgtccatgaccatgatgcatgtaatgatgtagtacatgcgacattggggaataacaaaactacaaatgggataacaagatatcccaaaacaaagggaagaacaaaatcctggcaccggaaactcaacgcccagcaaggaatccgggaatgatatcagggcatcaggcaggcaggcatcccgtcccgcgcatcccatgccgggcggtgcacctaatctcttcccgagacaaaggccacgggctcgaccagggccgatccctttgtttgttgcttcgtatggaggccatcggcacgggcgcgaagggaacaaattagtccaagctggcctcctgcttacggccggggccatcggaagagacagctagcgcgcgcgcgatgcaggtcgcctcctccgcagcctgcttggctcgcaagcgcttgtctccactcccgtctccggcatcctcccttgcgtcatcacggtcgccgctgaccgatgtgctagtagtagtatatacactcatttctgatctccaagaaatgcttcttcatcagagcaagcaggaggcaatagcttgggaatccgattcgttctcgcagaccattataagcaggcgacgacggtgagtttcagagctcagactttcagtctccccctagctaagatagtccgagtcaagttaagctgaggcagtagtatcagagaatatctccgggtgagatcgatagggtatggcatggatcgagtacgctatggaccatatctgttcttggcctgtgcaccctggttccagcagtgttccgaattaatacaagttgaactggcaacttggacactggcgagtgggcgcgagattcagatgcagcaagggtgggtcggtcgatcatcatcatcaacgtgcagtctgctgtttcttctgtcgtcacagtttagcaactgtatttcaatatacctggcaatactcctagccttcgacaaagggcacagctcgtcaggattaacagcggtgacgtcaactgtacgctacagtgtcagttgatgagtatagctagcttttgtcacgactcgctgataaattaacccggccggcagcatcctgatcgatgttagtggatctgcaaatctatttcgtccgtagtacttgatcgggactgtagaaaagacgaccaggggcatcactgtgtcaatagatatcgacagcagcaaagaccaaagagggcatgcaaggaggcacgagttaggttaagcggttgtctccttgaaccagttggtactcgtctgtagttggtgctccaactttgatcagtatcagcaaattcagcatcctctgaactccgaagaacagccggtggctgaacctacaagcccaaatatgactgtgacaaaagatactccctccgtctcaaaataagtgtagttttacactattcacatttaacgtttgaccattcgtcttatttgaattttttttatgattagtatttttattgctattagatgataaaacatgaatagtgctttatgtatgactaaattttttaaattttttcataaattttttaaataagacggacagtcaaacgttggacacggatatccacggctgcatttattatgggacggaagtggaggtagtaggatgaatctgacagatccggtaaagaataatgcttgcacagaaatcctaggagttgcaggatccaattctgctgcattgcgttgttttcagtatgcagtcgttacaggcgtacagcagtcggccaaccagcccactctagtgctggttgctcgcttgggtccccatctggtgcccacttcttattataaggccctgtttagatgggactaaaacttttaagtccctattacatcggatgtttgaaaattaattataaatattaaacgtagactattaataaaacccatccataatcttggactaatttgcgagacgaatctaatgagcctaattaatccatgattagcctatgtgatgctacagtaaacattctctaattatagattaattaggcttaaaaaatttgtctcgtgaattagcttttatttatgtaattagttttgtaagtagtctatatttaatactctaaattagtgtctaaagacagggactaaagttaagtccctggatctaaacaccacctaagtcataacggtttattaggaattaaaaaatgatatgttcttactggttaaaaagccaaagttgaaaaagaactatgttgaaaaaatattaaaatcaaattcaaaaataagttttaaaattcaaattttggctttggcttctaatgaggcccttgctcttgcacggcacgcacaagtatcagtatgtatagtactagtatcagagcaagtacaataatgagctaatagcctgcttacataagattttaacatacgtggcagagagagaaagagcggagagataaaagcgaacgactatattatcaccggctcaggcgcgagtgcctagaaactttctctgagggcacccacaatggttatctataggctctctacaagagatccatgtcagcatattttcctacttggaatgtattaaatgaagagagagagcaaagctatctactaacttagagatagtctatagagaaaaacgagacaatgcatgagagagctatagatacaaatgtagacatactattaaggtggtttactattaatcgagtctattgctgagatgtacatgttttatagatagcaccttactttaccattgcgggtgctctgacgcagccctgtgcaagggaagagatacctgcgaacagccaatagaaagatagaaccttacgttgggtaaagcaaatgttatagccgattactgtatttagcgtggtttaattagctgttagatgacgtggtaaatttttagcgcttacaggtgactgtactatttaacttactcttagttcgagtgtccgttccatatcactgcatttacagtggctggggtttcccagaaggaataagttcactttaggtccctctatttgtcggtcagttcgattttcgtcccttgacaacaaaaccgggtacgacccgtcccccaacttacgaaaccgggcaaacaaagtccctcggcagtatggaggacggttttggccgatgtggcatctatgtggcgcctacgtggctcctttgactaggtcttcatcccaagtggcattgacgtggcgattacgtggcaattttatctcgaaaaaataataaaaatagtgggacccatatgtcagctacacaaaaaataattaaaaaaaggtggggccatgtggtcccacatgtcagcctccttatctctatccccctctctctcccccctacactgccaggagagaagggcgagcgacggtgctgagggggcgacgggcggagcggcgatggagcggagtggcgacggagcgaagcggcgcagcggccagcgatgaatgaagtgacggcgggcggtgggtgacgggaggaagcggagcggcagcgcggcgaaatggagcggcggcgggcggtgggcggagcgacgctgatgacgccgctcccgccgccccccaagctgagctcgccggctcccctcacctctccttctccactcttggctcttcctcttcttcctctcggctctccctcgtccttgcggcggagcggcggtggcggcaggccacggggcgggcggagcggcgacggacagcgcatggctggtggcaggcgacggcgcgtggggtcgatggcgacatcgggccgtgcgaggaggcaacggagcaagtggagcttctcgtcctcaccaccaccaccaccaccaccagaaacagcggagccgccatggcgcttgcggagctccgacaaggggagggtgtcggtgcggccgtcccggccgcggtggcgaggaagtagagtcggcggcgcgggggagcgggagcgagagggtgcggcggagggggaggacgacgggaggagggccgcggcgactgagggacggggagaggcgcgcggcttcgatccctcttctcccgccggtggccatcgaggagaagggcggcggacggctcggcgagcgtgcgcaagagagatatggctgccgccaccccaggcgcctcgcgtgccgtcgcccgccgccagccatgcgctgtccgtcgccgcgagggaggaggcgagctcgtcggggcggccggtgggagatgaggcagcgcacgccggctgatgggagggagggagaggagcggtggtgcgcgagcgttggcggccggtgggagggcgggagaggagcggcggcgcacggggaccagcgggagggagtggcgtgcggcgacccgcaggtgggagggagaggagctgccgccgtcgcctggagagagaggagaggagagagagatgaagagaggggagatggggagagaggaggaagaagaggagggatgagttggactgacatatggggcccacgggttttattatttttctagatcggattgccacgtaagcgccacgtttgtgccacatcagatgaagatcgagtcaaaatggccacgtaggcgccacgttagccaaaaccacccttaaaactgctaagggacctcgtttgtccggttttcgtaagttgggggacgggtcatacccggttttgaggttcaaagacgaaaatcagactaggcgacaaatagagggacctaaagtgaacttattccttcccagaattacgggtagttgagcatagccacggggaaaaggattggagatgtctggcagactggcactctggcgcacatttgtcattcgtagattggccgtgggttgaaacgatcagatctgggcctctggcccaaatacccgaacttattggaataagttcactttgggtcccttctatttctagtccagtccgattttcgtcccttgaccgcaaaaccgggtacgacccgtcccccaatttacgaaaaccgggcaaacgaggtccctcggcggttttgaaggtggttttggctgatgtggcgcctacgtgccttgtttgactaggtctctgtccgacgtggcattgacgtggcgcttacgtggcaattcaactcgaaaaataaataaatcttgtgggacccacatgtcagtttcacatagaaattataaaaaaggtagggcccacgtgggccccacatgtcattctatccccttttcttccaccgcccttcgccgcccgcgcccgccgacggttaccgacgacgtgactccatccgccgccacagcccagcgaccagcggcgtcgcctgcctccctgacccgccatggccacgagttagtgcaagcgcacccgccgtcccgccgctcccgccgataaggaggttcccctgttgccatgctgtatcgaagataaccagcaatgcttcctccctgctccccgtgccggccatggcaacggtctcctcttcttccctctcgctgcctcctctctcctggtccttattcttcatgatctccgtgtccttcatggcattcgtgatctctccagctggcgtctccacccgctgtacatcctccacgcggaccacgccgcattcttggccacctgatacgtcggcgcgtttcgccggagtcgctgcctctcctttgccgtcaacgggagccttgtcgccatgcacgttgttgccaccgccaccgccaccgccgccgtcgtccgccgtgacgacctccaagttctcgagttccttccgagcccataggagtagctcatacgcatatacgccgggtatagatggccatatggcccgaggcccacggcccggcacgaagcccgcaattttggcccggcccaagcacggcccggcccgactagggtcgtgcccgtgccggcccggcccgacagccgggccgtgcctgggctgcaccctcggcacggtgggccggcccggcacggcccgatcaaataaaaaaaatatagggacaaaaaatagacttatataatcgtataaggcatggcccaagaaaataggtatacaaaatagacttattttccagccatttaaacacaacccacagagttgagggaccaaaaatagacttatttccagccatttaaacacaacccacagagttgagggatcaaaaatagacttatttccagccatttaaacacagcccacagagttgagggatcaaaaatagactctttctgtgaggcagcacaatagcccatcgtgccttcgggccggcccggcacggcccgactagtattgggccgtgcctgggccgtgtatgccgcccgtgggctggcacggcacggcccggtgcatcggtcgggccgtgccggcccgacaagcctcggcccaggcacggccgggcttgggccgtgccgtgccgggcggcccagatggccatctataacgccgggtacagacggccgcatgcatatgcgtcttcgtgcgagcatatatatgcatgcatggagacgaccagctatagcctctagctagcttcttgttggtttgccgccaacaacatgcagacgtatatattagccaagcatgtgtatatggctgagcacactcacatgtatgtgtgtgtgtgtgtatatgccatttcgtgcatgactcatgcatgagtcatatttaattcattagcttgcttagcacattagcgttgttagctagctaatttacctgcttcctgcaaccagccactaacacacaatatgcgagcgcggcagaggagcggcggcgggcaagcgcaacagtgggcaaagcagcggagggcgagcgcggcggcggaggggcggcgggcgagcgcggccgcgggcagagcagcggagggcgagctaggcgaagcgaaagacagtggatgggatggggagctcccccgtgctcggccgccaccaccgccgtgccccgtgccccagcgggtgccccacggcgccggcgacgaaggcctcgaggccgtcgatcgcgccgtgagcttggcgggcagggactcgacgaggaggacgaggtcgtcggccctgccgaggacgcgctcggtggccgggaagagcaccgcggcgatgtcctggacgacgaggaggtgcctgtccatgaaggccagcgtggggcccaccagatgtgccctaaagactgtgtgaaactgatatgtggggcccacgtgggccccaccttttttataattcctgcgtgaaactgacatgtgggtctcacaagttttatttatttttcgggttgaattgccacgtaagcaccacgtcaatgccacgtgggacagagacctagtcaaacaagccacgtaggcgccacgtcagccaaaaccgccgagagacctcgtttgtccggttttcgtaagttgggggacgggtcgtagctggttttgtggtcaagggaagaaaatcagactgggcgacaaatagagggacccaaagtgaacttattccgaacttgttcgacgtataggcctattagtgccgaacttgttcgacgtgggctagatgaactcgcagcccattgagcccttgcccattgaactccaggtgcggtccaatagcccacgtttttgtttttgagaatggaaggtaattctcattgcctggaattttggagaaagccaactagaagataacaaggtcttaaacaaaagaaaaggaatagcccatgtttcaacctacaaatatctacaagaagtttgtttggtcttttttagataataaatatgtatttggatttttaagccccacgttaaatccgtctttcttggacttatcaattgacttataacttagtctaagtccaaacaaatattctctttgtatttaaacatgacactgttagactttattcattcaaaatttttaaactttaaccatcaatagctccttttaaggcataagaattatatgagtgtttttttcattataattattttaacgatataataattttgttagatagtactccatccgtttcacaatgtaagtcattttagcatttcccacattcgtattaatgttaatgaatctagacatatatatctagctagattcattaacatcaatatgaatgtaggaaatgctagaatgacttacattgtgaaacggagaaagtaccatttggatctaatagaaagctgatagtcaaaattttgaaaaaaaaaagttaagagcattcttaatttgtataagattaacacgctcttaagctaggattcacttgcttgaaaaaatggtctagaacatttcacaatgtttatagctggtgcaacgtaaaaaaataatttgtatcaagcactgactgcttctctcctcttgtttggttctatttttcagtgtgtgtatactgtattattttattgcttgtgtttgggccataagcttatggttactttttatatttattatttatggtctattgccataatatatatatagccaaccaaagaaatcttttcagccttataatcctttttattggcttattgtggctgccctaatgtcaaatagacagttttacgaggtgtttttaaaacctatagctcctatcgcattaataagcattaatacactataaattaggggttttgtttttgcattttgggattggtgtgaggttaggagatttgtccttaatatagttttgtatgtgcagagaagacaggtggggcgaagttgggtggccgcgagcggagcaggcaggaggagtgggacgatgacatgcgaagtcagcggggcggcagcggacagagtaggcaggcaaagtggggcgatggtggcggagcgacaacgcgcgaagccagcggcgcggagcggggtgatggcggatgaggatggcgatagcgacaagttcgaggaggaggagtgggacgatgacgcgcaaagccagcggggcggcgtcaggcagagcaggcaggcgaagtggggcaatggtgggcggagcagcaacgtgcgaagtcggcggcgcggaacggggtgatggcggacggcgatgacgatggtgataggttctaggaggaggaggaggaggaggacgcgcaccacttcttcctcttcctcgtctcctccatcttcgcgccgccgtccctcaccacattcgctgtcgccgtcctccgcaccctgtctccgctgtcctttgcaccgccctccaacctcgacggcttccttgcataggcggcggctcgccacgctatcccctcgccatgggcggaggaagtgggacccaccacccgcacccagctgctccctcgccgctcctcccccaccgcccgcgtgcagctcctcccgcgacggcggcccgcgcatagctcctcccccgtcgtctgtgcccgccaccggcgaccagctgctcccctcggctgccgcccgtacatagttgctcccccaccgcctcccgtggagaggagaggagagaggaagagatgtggagaggggaggggaataagaggctgacgtgtgggcccacgtggatcgcatgctgagtcagctgtcacgtcggataaaaccagagtttacactggttttgtaagttgagaaatgcgttatatctggtttcgtggtttaatgacgattttataactcaatgacaagttaagagatcttcggcgtacttttttcctataccttcctccccagtccggctctccgaggtccgagcaacggaatcgagcaaagtatcccccactcccgaccctttccgcatcatcacgctcacgcagcccctctgttattccctccctccccctcttctggtccttctgtccccggcccggcccgtgcctcccccagtcctcctctcccccgtctcccgccgcctagcgattcccggagcgcctcctccgccacccatcctgctccaatggcgcttccttacctggaggccgtgctgtgtaagatttcctcgcctcccccatctctcgtttggtgcggtggtacgctcgccttgatcgctgatctgtgtggggatggcgtcgggtttcggttggaacgggggatccgtgcgtaaaccctagggtttttgggtgggcgcttgggtttttaatctccggctcgatttgctcgtgctgtggtggcgattgggcgtggcggcttggtggtagcgggtagggtggattaatctaagttgagtcgagggagcttaatgcgattggcgatggcgttggcgctgggggagaagggccttggcgctgatgcaatgaagttgctgaatgtcggtatcgatgccatgttttatgttgttcgtgattagctgttcctagtatactggtttgcttttgtgttgatgatttgctgagtgcccatcattcaatgatgtgattataggaaccggtgaagtgaaaatgtatggcacagacgcttttgttcttaataaatacagtgaagaccgtctgtgattgagtgtagttagagtggagatgtgcgatagagctgcgaagtcatcttggcttaattgatcatgagggttgaatttctgtatttttgttgtgttgcaacactctctatcatgcagtaggatgcaatatttgtagagtttgtggtgatttatgagtttaagatggcaatatctattctgaaaagaagttacttgtaataggatctgtgacttgcatatgttagctaagactcatgcctctcgagtgaagtcaggtcatggtatatatttacattcaacactggatattgtatatgatgaaataattttttaaaaatttgtattcgttttgcaggctttatgattctcatgtatatatttgagacatatcttgacatccgtcagcatagagcccttaagttgccaacactgccaaaacccctggtaggagtaattagtggtgaaaagtttgagcgctccagagcttatagccttgataaaaggtatgtgtaatactgctctcaccttttgcaaccttacattattcattttactgcaatcgttctaaagtaattcagactgccaattttttggattttgtgtgttgacatttatgctcatgttacagcaaattccattttatccatgaagctgtaactatattaatggataccacaattctgtactatagagttcttccctgggtttggaaggtaaaacaaaatcaatcagcttgcctctgtaaactctttatgcaagtattttgttgtgattagccttcttttgtagaaatctggagagctagcaaccaatgctggcctaaatgctgaaaatgagatactacacactcttgcattcttagcaggtgtcatgatttggtcacaggtatagaataattacttgtacctgccaagcatcttatatgtttattgcacatatatttttaccttcattgcattcaaaattaaattagcttccagttgtcttccagcacattgagttaggtataaactgaagccttagctttccatgattgacaatcgctagctttagtttaacacaaatggtggttgctggattgtctatgtcgttagttactgcatcaaaagttattattagtcaggactgaagcgcatagcatagtgacacctatgaaactattgacatgcatttccctattctgcttttggccctgacagacatgaacagccactctagttcttctctgactggaccatttttcaacttgaaaaatagtggcaaaagttgcctgtattttcttaaatttgcatgtatcaagatcaggatatttgagataagagtcttatctcaaatatagcgcttcgcgaccgctataacagcccgctattgactttgttggaccattataacgcttaaatgttgttcttcatttatggattgtagaactttacattgtttatcttatttatcttatatatctatatgttatttcatactttttatgttatgaaatataggagtaattaaaaatgtatgaatttgatgttaatattgatatatttatggttattttcttatatttgctattggaacttagcgtccgcaatagcgcccgctatccgcaatccgctacacagacactaatccgctaacaacccgctatacactatttattaccttggataagagtaatcatccttttgcccttttctgttgagtacatccagtgacttttacatgttaatctacacctatgttcatagttgcatactgatattgattgtttaggtctacatctactagaactttggcatagtgttctcttatggtgaatcaacttcttttgcaagccatcagctaaaacatgccaactccactatttgatgtgaaacactgatacatacttcatgcaatgcagatcacagacttaccattctctctttattcaacatttgttattgaagctaaacatggttttaacaaggtatgtttgtgttctcaattttagcacctcagttattatatgttttaacatttgaatggtgttcacctgcaagattagtgaagtacaaaagtatcttggcttatgaatttgctatgttctaatccccaacatatttattctgaacctctagctttggacttttttcagcaaactatttggctcttcattagggacatgatcaaagggattttgctatccatcttacttggacctcctattgtggctgctattatcatcatagtacaggtatctcctgtctttctaccacacacttcttcattgttggctagtatctggagaacaggcttacctgttttttgcgggatctgggcccgaataccacaaactcgtagaagtgtgtgaactgattagtttatttctctgtgcttcagaatggagggccctacctggcaatatatctatggggttttatgtttgcattatctcttgtgatgatgacaatataccccatcgtgatagcacctctgttcaacaaattcactccggttagtatctttttctgttgtagagcatacctagtatgctgtaattagttcacttgtctgttttttgtgtgagaaaggtacatgcatccattgtgcatcttctaattcgtgtcccatgttattgaactacgttgacctattaataagccgtacggatggcaaaagctcttttgaggtataactagatatggttgcacatattttaacagcttccagaaggagtactcagagagaaaatagagaaattagcagcttcactcagttttccattgaaaaagcttttcgtggtggatgggtctaccagatcaagccacagtaatgtatgttgattactctaccttcagggttgtggttcattgataactgatagtttgtaattttctgtgtgctttgaactgacaattttctttcaggcttacatgtatgggtttttcaagaacaagcgcattgttctctatgacacgttgattcagcaggttatatgctaagttgtttagtttcattataattttgaattacatgcatgaaactcacctggatccttttgtcggtttcagtgtagtagtgaggatgaaatagtttctgttattgcacatgaacttgggcactggaaactcaaccacactgtgtattcctttgtagctgtccaggtattctctttgatgccatgataaactttgcataacaattgttcatctattttgttgatatagtatttgtgtacttctgggataaaaaatgtgtatgtaatccgaaatgtcccgttggttctcctaaaaggacatgcagcatttttgtgcccctccccccaactttatcattgtatcatgtaatgcatgaatgagaactattgttttggttacagataagaaaagtgcataaatgcaagcatttgatcactaggacagggtagctaatttcaatattgtttctggtaaagaatttactattaagaaaagtgacttccctgtttgttcaaagtaaatactgcatgaccatagcatgaaaatcctgactggtgcttaactggtcactctgctggtacttggttttactggtctacccggtccaattggtgaattgtcaaaaatattatattcaaacgtattttaagtctgatcccgcaactaatacactttttttcaaatatgcataatatcgccaaagaataatatttagctcaatccatttggctagaagcccaacatacttgtgagatgggacccaagtttggtttgactcaaaaaactatttcccctatttttaccataactttctttttttctgaccgaaccaaactaggatctggtcctgggtttttccagttggacccgcctggcccctttttttgtactgtgtttgacatgcctgcttctatgatggatatgatgtgtgatgactgatgagtggctactaggttatgctaagcatgccatttccttagatggatgactatttaacaaaacaaaccttggcataaggttagcagaaaaagttactattcaatatccagagcaaataaacagtgtttagcatgtaagtaggattaatggttctttttcgaaattgaatctgtgatacagtccctttgcatctgttgctggagagtactgctgctttttagtacaaagaaggaaaaaaaacagataaatcttcttttgtgtgttgagagttttttcacttcgtctcctttttatgcagctccttatgttcctacaatttggaggatatacgctagtaaggaactccaaagacctttttgaaagttttggtttcgaggatcagcctgtaataattgggctgatcatatttcaggtatgtttactcatatttgtgaagaatattttcttccttagatatacaaagtctttccctagcacaactacctgcttgtactgtgaaaatagtactacaggtattgtaatttttcatttaagtttgcagtggcttgcattttttggtggatttctagtattgctctattacaagttacaacttgattgacatgtccgttgcttgattgtagcacactataatacctgtccagcaccttctgagtttttgtctgaaccttgtcagtcgggcatttgaatttcaggttcatttttctatttcccttcaaagtttctgctactgctgctttataactttcagttgcacttaccttgatataatttctaggctgatgcttttgccaagaaccttgggtatgctcctcagctccgtgcagcccttgttaaactacaggtaaccatcgaaagatccttttgatttattctcactctaattgctagacacctgaaccgcaaggtctgtctgattcttgttctgttacccaaagtactttcacgctcattattcacttgaactgaacatccgcattagcgttctcttatcgtactgtcggttctcgttgttcgtattgcccttggtcacctgcacaaactgcttgcaaatttgcatagcctaatttggaatttgctttcaaatttcaggaagagaacttatctgcaatgaacacagatccgtggtattcagcctaccactactcccatccaccccttgttgaaaggctctctgctcttgaagacgcagacagcaaaaaggaaaactaacggaaagttgatccacctgaaacaccgaagtctttactcttccatgggttaccttacggtgtcatggaatcgtttcaatgttcgggatgttaatggaatgtgtgagtacatgagaagtactgtaagcgttcaaacatttatcatacaggggaacgttggcaactatgtagctctcgattaagatagtttgccttccattaattggcttacagatattgacatatactccttccatttcacaatgtaagttattctagcattttccacattcatattgatgtattaatatgaatgtgggaaatgctagaatgacttgcattgtaaaacggaggaagtacatgtcagtgtattctcctactactttcgacaagaaatagaagtgaatcagctattgaaatgttcagatgcacacgcagcacggcggagtcccacagatgcactgatgtatcttgtacacggtacacccaaagttgcatttctttgctttctccgtagccggtgcacgtaggtacgtatgcaaagaaattagcaaggtatagaacggttcaacttctaatccatttgctgggccgctctcgctctcagtctcactccaagctccgatgctctccctctccactccgtcgtcgcctccgcctcctcttcctcctcgccgcgccaccaccgctcccacccccgtcagcctcctccgcggggcagctgaccggcgggatgcgccgctcacctccgcgctccacgctgccctcctcaagtccggcgcgctcgaccgtacccagcctctcaccgcgtcgaactctctcctgcacgcctacctccaatgcggcctcctctccgacgcgctccgcctgctcgacgaaatgccccgccgcgacgccgccacctgcgcctccctcgtctccgctctctgccgcctcggcgcgcccctggacgccatccgcgcctacatggacatgctgacccaggatgccgacgacgaggacggtggcctccgccccaacgagttcacggcggccgctctccttcaggcttgtgggctagccaaggtcgcgaggctagggaggatggtgcatggccacctcgtgacaagtgggttttgctgtgacccgtttgttgttggctcgttggtcaatacgtacgccaaggttggggatgtggtgagcgcagaaaagctgcttcttggaatggattccagggatgtggtttcttggactgccctgctttcagggtgcgtgcttaatgggatgctagcagaagctctcaaagtgttcgtcatgatgctggaggataacgtccttcccaacaacgttacaatgttgagtgttattcaggcgtgctctttgatgggagagtcaggattgttcagttcattgcatgcgcttgttgttcgcttggggctcgagaatgatgtttcagtggtgaattctctcatcataatgtatgctaagaatggatttgttgaggaggccacaggtctttttgaggatttgtacctgaggagaggagatgtatgccctaattctgatgttctttctgcgcttctttttggctgcactgtttcaggatccttgaagtatggaaagggaatccatgcgcacttgattaaaatgaatgatttgccaagcattagcatcgaaaactccctgatgggcatgtatgctagatttgagcaagttgatgcagcatatgtggtgttcaaaggtatgcaaattaaggatattgtttcgtggaacaccatgatctcatgcctggcaaagagtgatcatgtggatgaagccttggagctttttagtattcttcatggtggtgatggacttgtgcctgactttgtcactgtcttgagcgtagtgcaggcatgttctaatgctggattactgcagcaagggcagatgctccatggatacattataaagtctggatctttgtatgatgtctcaatctgcaatgccctgataagtatgtatgctaagttgggaagaattgatttctctgagcagatatttgagcagatggatattaaggacattgtttcgtggaactcaatgatcaatgcttatggtattcatggagatgggctatcatctctaaggatttttaatgagctgcaggatgatggaacatgttcacccaatgctatcacatttgtgagtctgatatcggcttgcagtcattctggtttggtttcagaaggctacagatgctttcaaagcatgaaaaacgactacagaattgagcctagcatggatcattatgcttctgtagttgatctacttggaagatctgggaggtttgctgaggcagaacaatttatcagaaacatgcctgttcatcccaattcatccatttggggacctcttctggctgcttgctctctttacgggaacattgatcttgcagaaaaagctgctatagaattgtcaatcttggaaccggagagtgacatatggagagtctccttgtcaaatgtctatgccgttgttgggagatggaaggactctgcaaagattaggactgaaatgaagagagttggcttgaaaaaggaagcggggtggagttttgtagatgtaggaggggtcgaaggttttaagtttgtggcagcagatacaaggcacggcgactctgagcaaatatatgcagtattgcgcagtatgaacaaacacatggcagatgtagctggtgatgtacatcaatcgagtctagtgagtgtaattagttgatgtctcaatatactcatatacactgattctctcttttaatttagtaatttactaatgtgtgaaagtactaacttaaagtgacatgcgatatatcgatttgggcatacaaacagtataaattgaaagcaaaatggcatctgaggtgaggacgctgctttgttgtactattttgctcttcctgttaaaactttgtttgtgtgtgttcttggtataattatttgcattttggtttcagtttcggacctgtgctgtaatctgggatgtaaaaaacttttactatgtttaacagtaacttttatttcttctgatgaatgatgatcccgtatgccaccagaattgttgctgaaaatcttgctgccataaaattctaatgttcattgtgaaacagtcaagacacaatctggacacataaaattttacattgcactcggttttattgtttttgccctaaaatttcagtgataaaccacttacataaggacaatttgttcactatgttacaattcaattcctgtaatatgtagtacacttccattttcctatttccgcatcagaagaactacagtgtgagcagctatgctcctgttttcaccaagactgtcgactttctcgtgcgtcttggccttcagattgacgacggatggatccgcccccagcaagtcacacaagttagaccgtattgtctccttgaatgggctaattttgggtttctgcaagatcaatgtagcgtctaggttccccagctcatagccagcttcatgcatcagtttcacctgaaattgcacatttgcactatgatcagagacagatgaagccacctaaagctgcatcaactagcatatgttttgactttaatgatatagcaccaaagagaaagtgcacacgaaatatcaggccagttggataatacactatacaattgcctgatgactaagacaggaccaaatgctgtttaatgcaaaatcaaagaggaaataagctaatttcagttctcaatgttccatgaggtcatgtagagaaatgatcacatgttgagttgaaattctaaagcatggggatactttccatccaaaagtccaaggggaaacatgcagtcagcattccaagcacatgataagcaccttgctcaaattctaaaacgtggaataccttttgccctggtagagtacaaaaagtccaagacctaatttgaaagtcagactcacgtgcaccttatgcaatcaggagctaacataatcaagacagaagcagccgccgatgtttatggtgtttcattctttcagatgcaacaaataaaatggtaaaaatgaactgtctgtcctccacccacaacaacaacattaaggggaaattcttccttttccggggaggacttgcgttagttttgaccaatgcaacacaccgcattgcgagagtgcgagtacagacactttggatgtttggagtctagacttcaaacttgatttcctatctctaattcaagtaggcaaactagttaactagacataagaattcaataatatctgaaactgcaaatttattcagcaaatttgtttaggtgaagcattccatggactcctaaaagtctaaacagtcctaatagcacacaaatagtctaacatgcttgcagaaacaaaatcgaattgccttaaaacaatgaactgaaaagtggttccagagctcgagaaactcacagcttccctcatgaacaccgacgaatcggcgcccttccaacgggggtcggagtccgggaagatctgcccgatgtcaggcagcccgagcgcgccgagaatcgcgtccaccacgcagtgcagcagcacgtcccctgcgcgcacaaagaaaggccagcgacggaacgagtcaaggagcggaagcggaagcacatagagaagagaaccaagcagcaacaatagccaccaccaccaccaccaccaccgcgcccgtaccgtcggagtgggcgtcgcagccgcggtcgtgggggatgtcgatgcccccgatgatgagggggaggcccggctcgaggcggtggaggtcgaagccgtggccgacgcggaacgggagtgccggcggcttcggcgccgcggcgaccgcgggctggtgctcggcctggaccgcggccgcggccaacgtcgacggccgccggaggcgcagggacggccgggcaggggaagccgagggtgtggaccgggcgcgggctgtcggcgcggtggcgacgggggaggcgaggaagagtgaggaggcggtggccatggcgtcgtcgcgaggcgagatagcgcgcagcgaccgagcaagcttggctgttttgtttgggggctttttcggctgtggaatgctaagaaaacctgcggtttttttgcgtgcgccggaagccccgaagtatttgcggtaaggcgaaggcgagacgagcatctggcaccggagatgcgatgtgggcggggacactcttatattttttttcttactaatatatactccatccgtttcacaatgtaagtcattctagcatttcacatattcatatttttcacatattcatattgatatcaatatgaatgtgtgaaatgctagaatgacttacattgtgaaacagaggaagtaactaccattcattttatttaattttttttacaaaatttagaaatataaataatacttaaagtccctttagtaacaaataaaaaatatttacttaaattttttaataagacgaatgattaaaaagttaacgatattatatattgaaaaggtgaatgtagtacttattttacaatttaatacttttcttttaacttatcagcaacagctaaaattttattatatagttgatgtgagggttttttaaagcagtttttttccgtcttgaatttaaattcacaaataatacatatataaaagttttactatttttgttgctttattttttcttttacaagtcgtagctcaaccgatgaaaaagcaatcggtgcaccattatcataggcgtgcttactaagcgatttttgttttttaaaaaactttattcatcagcatttcctgaaatactccacactttttactttacggcctcaaataattatcataaacttacttaaagcacacccttgtagtccaagattagtaaccctactccccgaaaaaaaaagagaaagtcaacagcgtgagatgaacaaactcatcgatttttatgaagataggcaaacggccaaacgcattactagactaactagattagttgccaaacaaggttaaataactaattcccttaacccaaacaaaatgtagcattcacattggggtagtctagcatgatcaaatattcaaatcccggtaggtatccggaggctttcactccttaccgattgcagttatgcaaaaactgaaatgatatacatagacaatagtacacttggcctttttcatcatagagaacttacatggcaagtgcacaactcacttttgcatccagaacttccaaggatcatacatgatacatggtgcataacacatgatttacatagtgctaagccgctttacagcactataatcagctcagctgaaacctcttcacacatatctcatcagatggactgatggagcattctgtttctggctatgccatgggtcacttggggcagtagtgccttctctgccagatgacagaaacgagaatgccatcaccagctgaactcaatggaggaaaaagggagcaaccagcaatccagcatcactcaaaatttcctttccatttcccattactaagaacagccttttaactagagaaagatttgcgcgccaaggcgaccgaggtattgggtgaggaaaactacacgcttcagggctaacatatatacacaattaggctattataccgctatagacagatctcacctgtgcaagcctactgtacacggttgcacccttacacattctgcagttgaaggcttgaagcttagctagagatacaatgttgcaaagtgccttcctagtgcttcaccaagctccgaatgactgacgagctgaaattatcggtggagagacttctcagcaccttttagccagtttggccagggaagagacctcacactttctcagcactattcgcccttaatcctgtatttgttgcatgatcctcatttctctgtgaattatagacataaaacaaaaacaaaaggatgcaggccttacatgaatggagcacttaatggtctatcagctagaactgagcttctggtgcttcctagctcaagcccatcagacggggtactgtatgaagatagcaacttcttctataataaatttcataggacacaggttagttccttttttcagaagaacagacatatgctctaattgggtaatggaagcatactgaatgccataattgtgtagccttgtaaatgacatcctatttcaaattgctatgatgcacagcatgtccaacatactaaagaaagctatttttttcagtggtgagtaactcttttgaaaagaaaattcaatatggtatcaaccttttattattattattattattattttggatgccctcatgcttcataatgttatggcttatatacatcatctcaattgtgtgttacaagagaagggctagaacttaagacctgctgtactggagaaaatttgatattggtacataccaaaaatttctgatagtttcaaaagtttgctaaaatttggtgactttgcacacattttctgatagctgcccatacattccagccattctgcacagacagtaccagaaaccatggcaaatgggcaaccctgctagaagcacagaatgtgaacacagacacctaagtccaataaggcatgaacttgcttctaaaatcatgtttagtttatccatatgaaagaaataaattatgatattgataaaatgaaggtgttaaaaatcagaaacgaatactcatcatacatgcatttatgggattttcagaactagttacctccaaaccacagtaaacaataactgttagcgtactacagcacatgcacaatgtggtgctaacattacctttcatatgtttcaagaagtcaacaaaatatcacagagaaaaaggcaagtatggaaaatgcagcagacagaaaatgcttgaattctgttgcatggaacattttctgtaaaacaaacagcagtgaaccatacacaagcatgatccaaattctaaaggcatttttctttcttttgaaggaagtaatggcagtacacagccaaactgaattctagaggcatgctggagagctgcgtacctgatcttcaaaatcaggactagtcaaattgatggagagatttctcattaacaacaatgcctaaaggggagaaaaatggacacacgtcagttgaaatgtcgagtttgaaaattgcatgctaaggaaattatgaattaaatatgccttttgttggtttcaacaaagataacaaaacaatctaaaatgctgactaaaagcatacatattgcttgagtgaagtaccacaaagaacattctttatgcttatgtttcagttgtcttgacttgtcacgtacaattatactttaactgagcagaacaaagcttatccatgattcacataccgtctcaacatcaattggattcatctcctttagtttctgtaaatggccacttgtgcttggatcgaaaacgctgcccaagaagctgtatacttgtgcaaaatctggcataactacattaaaagattaaaagttaacaatgccagtctgaaattttgaatcatgtaaataaagcattggttgaagacagaaacctcaatattgttactgatcaaatctatgaaaaaaaaaatatctgtaaggtgccaggacctgggaatggactgtgctgtcgtgtaacactacttttcagttctaaaacacctcaagcagaatcagtaatttgttggtggtaattgttattctaaacaagtaaccaagtgttataaagattgaaacaaaacaagtgcacagagaggaagatcaaaacagaagccacagaaacaataaaaatgggcaatatgactcaaactgcagaaagataactatataaagaaaaatcttaagaggtactaacggcggagtgacggaacttgatttatctgatcattagtttcaccaggttgccatgccctcgcagggccttcagtactgctagagcaaaaattgttgggggccattgctccagcacctaaatcttctgagtgaaagaagataaggattaaatcttctgagtgaaagaagataaggattaactgatggatattgcatttgaatttttataaggaagaggtaccacggacaacaaacctttcaccatggatgaggctacaattggtgggatagaattgtgtgtccatgacgaaacagtggcattcatgcctgagttcctaagcatggaagatgaatctgcctttatggtatatcctggctctgcaagatgagaatatatattgaagtaaatgttttgtgcagaggggggtactgttagtatcaaagatatatgtgttgggtgcgtgctgaacttatgagcatatgaggatctaccatttttggaggccttttgagggtatggatgagcagctttacgctttggtcgtggaggtgggacatgctcacttgttccattcttttgaaccttcaaaaaatacttctgtgcatggctcctaatctgcaaaatcaagttgagatggtaaacaaaaattatttcactggagagttgatcgtgtgcaatgtctgcaaatattttattgtgagaagtggagaaaagggatttgaacccatggacacaagcaccaacgcactgtgtattacaccacaaaaaaaggcattgtgtattagttgtttattataggtcaacatatatgacatatatcaacaaatcagggattcagttctgctaggtttgtgacgaaatttgatgccacaattccctttattcatttgccagaggatatccccttttccatttataatttgcccacctgaataacagtcttcgatccaacaaaagcttctatctttttccaatcacgatcaaagctgaaaagaagcaaggtattacacatgaatatcagatgtaaaaggacagtcctacaattgaatatcaaaccttttgtacagatacttgaattcaacagcaacaaatgcagtgtttttggtgcgccaaaacacattattggcaatcatatgcaaatagggggaccaatacgttggaagcatttcatagtaattatgattactaaaatgtccaataattcaggtgtgctcaaccaggtcaaagaaatatcaagtattatagcaccaaaagtccaaaactacgaagcagagaactgcaggatactgctgtactaatttgtgagttgtgaatttgtgacttttggctaattacgagagcaaatgctttgaggccttaaaatatccagtgggggtgctatacccggacaaatggcatcactagatgaacacaaagcacctcagtttgtaaatttgtgctattatttcaattcatataatctgcaaattttagtcaaaaaaatataatctgcaaattggatccttagatttcctctttgcccaaaggttgtaccagtactactgattattgtccttgtgcacaacagcagcttatgaaattctgaaacacggcttcatctcagtacagacaagaaatctttaaaagatcccctgactaaaaaactctccatatgctactccaagaccaaatttaaaaacaaatgaacaaacaaacaagttttgttttttttacgtaaaacaagttaagtaagctattttgctactgttttatatcaataatacacaagacagcaaaaaaacatcggaacctaactaacgcatcacaagagctagaaaaacattcaatcttcacctcaaagaccgcacgattgcaaaattccgagcaaaaccacgcatcgagttgggtggcaaaagacggggtgaaattaaggaaaaaggcacggcaattccgcgattttgcttacagctggagggcctcaaggaacttgtcgtgctcctgctccgtccagctctcgcgcgacttggtgatggtgtacggcttccgcaccttcttgctggcgtcctccccagccgagcccgccgctgccgcggccgcgtcgggcggcggctggttggcggagaccatgggagcggagcgtgcgggcgctcggcgtaggcgtcggcgtcggcacggcggctcagagtctctggctctgcaggcgtggcgtgatggtgggtgggagtgtgtgggtggtggcgcagcggcggtgtggccgtgcgtttggtttggttggggaggggaggcggagagattgggaacggggaaggggacggcgtgcgctgggggggcttgtggctgcgcgggcggcagagcgccagccagccactagactagaccaccacttaccactgaccaccgctgtgctgtgcccccgcccacttgcctcccgtcccgtccctctcacgcgcgtcgcgctcgcgatctcggcccgctccttcgcttgctcgctcgctagctttttttttggttactcatttctcaatatgtggctccccgcgcgctcgcggctgttcgtgagacacgaccgggtaaacaaaaatttggggcgaaaattttctaaggcgtttgcgtcgtcctgtttatcggtgagtccgtgaatatcctacagtttcgtatctatcctactacagtcttcctactggtacatcaaaattggcctgaaatttttgagtgggacgttttgttctaaagttagatcatcgtggatgtgcttatcaaggtgctaaacaacgtgttttgtttaaaaaaaacactttcttcatccatatttcttttaattcatttccaacttttatatttatatttagtttatttgtttgcgatattaaataattgttgtgaagtcggaatatctaccgtccattacctgtcctcgctggtcagctttagattataagatattgagttatgatgtttgattttttatcgtagttgtagggattttttttccttgaacaaggtagattatattaaatgggcatgttcggctgttgatttgcagctgcaattggaacgagcctaatactaagcgaggtatgatataaaagggttataaaaaatagaataaagagcctccacatcttaaaatgttacaatatatgcgagcgacgaacgtatccacgacgctgaccaactccagcatatgcagaacaaatgaacaaatatcaaccatcatcttcattcaacataatagcaaaccgatgtcatcaggcaaatcgaaaacctaaatacaaaagccgtcgctgccgatttgactattaacagcttgacaagaagtctagtaaaaaatgtgtaccatctcatgaaaaataaaagaagcctagtaaaatattagtatatcaaacatttggtgtgaaaatatttttcaattcattaaaaaaacaaatcccattgtgcgtctgtcgccgagctcgggcggtcactagggatcgctggcagcaaatccacccctactaacatgaaatgccttttgcaaactatgtgacaatcaaaaacacaaaaaagaaatttattgcacccttcatccccgaatatagcaagttttagtgtttggtgtgggtatcaactatcaaggagagataaaaagattgatcgttttctcgggatgagtaaagtatatataggctaggattatttatggttataataaaaccaagaggtagtaaaggtaatataggtattttagtgataaaaatcacattttactcgtaccagcaccggtggagaaacctttttttactccggttggtaacccctttagttccgagtttctaaccgggagtagaaatctgggactaaatctttagtcccggttggtaataaaaaccggaactacagagagggtagcggcagtccaaatggtccccttttctttttttctctttcttattttctctcgtatcgagtggcatgcatatccctaaatcaaaccccaaatcaccaaatcaaaatagcatcccaaatccacatcacaaaatcaaagtaacatcccaaatccacatcacaaatcttaaagttacttatacatacaaatcaaatacatcacaaatcctaaaaaaattacacacaaatcaaatacatcacagattatacatcttagatccgtacaatgaatcacaaaattatacatctcagtcaaccacaaattatcaaaaaaagaaaagaaaagaaaacaacgcctgcctgacgcctgccgccgccgcctgcggccccaccggccgcccgccgcctgcccgccgccacatgcggccccaccggccgccggccgcctgcccgccgccacatgcctggaggaggggggaggagaggggaggggaggaggaaggggaggagagggaggagatctgtgagaggggaggatcgatcgatctgtgtgagtggttgcgatcgtggaggagaggataagtgatagggattatatactacgcgttgaattttagtcccggttggtaataccaaccgggacgaaagatcatctagatctttagtcccgattagtattactaaccggtgaagcatctaggcccccgttgttaattttggtaattaatgacaaacgctaattgtggactaaccgttgctattgagataatattttaagttaggtccacgtcatgtgtgcgcatggatgactatcgatggattaaaattgacggcgcaaagcaaagagaaagaagacggtaaaagtagtgctttaatttaattgatcgaggtatagggcgatcaaatttgctagtttattttttagttttgccgtactattaagaggggtaatgacctagcaaagagatgattttaattgccacattaggtcattatgcatttagacttgtgctcgcttttcatcacacacacaatcacttgggatttcactggtttcggcctgatcaggggcggtcagaccggccacatagtggcggtttgaccggcgtgccctggccggtctgaccggccgcaagacggcggtctgaccggcgaataaggccggtctgactggcggcacatgcgtggtcagaccgtccccctggaggccgggatggtgctactcggggtggccgatacagagccgacggagccgtattcggtcagaccgaggcgatggcggtctgaccgagccaaggtcggtctgaccgcccactcaacgccggtctaaccggccaggccgatggggccctctgacagcactacaacggctagttttctagccgttgcagagtagcacggtctgaccgaccgcataccttcggttagaccggcagagcacaaagttaggggatttcgcccccaacggctagttttggttggtgggagtataaatactctccctccagcagcaaggggtctctcttgacacccaattcaattgcatacaccccttgcacctctctcacacccacttgagctttgtgttcatccatctagtgtgttagagggttaattagccaagagtcaagtgcattgcttccatttgtagagctagtgtggcacttgattgatcacctttcaagaagtgcattgctctccaagccgaagttgaagataagagcaagggcaaggtgaatgaagtcaatgaggacttggaggaagagattgcccttcttgctagaaggttcaatgatctcttgggaaggagaaaggagagaggaaggggctccaactcaaataggagtagaaatagaagacccaacaagactctctccaacttgaggtgttttgagtgtggtgagaagggacactttgtttccaagtgccctttcaaggatgatgatggagacaagtcatccaagaagaagagtggaggctacaagctcatgaagaagctcaagaaggaatgcaagaagattgaggcattcatcggggaatgggactcaaatgaggagagctccgcctcatccgggtccgaggaagaaggtggtgatgatgcaagctccaagaagaagaagatgaccgttgttgccatcaaggaggctccatcactcttcgctccactttgtctcatggcaaagggttcctctaaggtaacatctcttagtgatagtgagagtgatgatgattgtgatgatgtttcctatgatgagcttgtgagtatgtttgaggagctccatgcttatagtgagaaggagattgtcaagttcaaggctctaaagaaggatcatgcttctttggaggtcttgtatgaggagctaaagacctcttatgagagactcaccatttctcatgagaagcttaaggaagctcatgacaacctcctttccactactcaacatggagctcttattgatgttggcatatcttgtgatttgcttgatgatagtgctacttgccatattgctcatgttgcatcatctagcatttctacctcttgtgatgatcttgtggatatgtctagctctagctcttgtatttccatttgtgatgcctcacttgttgttgagaacaatgagcttaaggagcaagtggccaagctcaacaagagtttggagaggtgcttcaagggtaagaacactcttgacaagattttaagtgagcaacgatgcatccttaacaaggagggacttggattcattccaaagaagggtaagaaaccttctcaccgtgccactcgttttgtcaagagcaatggtaagtattgctccaagtgccgtgaggttgggcatttggtgaatgattgccctggtggtaagcctcctaagacatgcatgtttgattctcattatatgcttaggaaggctcatgatggtagcattgttgctagatatgtgggttcctctatactcggtggttaaaagaatgccatttgggtgcccaaagctttggtctctaacctccaaggacccaaacaagtttgggtacctaaaagagcttgatcttcttttgtaggtgaactaccgcaccggtgggagccattgggtgcttgatagtggatgcactcaacacatgaccggtgatagagctatgttcaccacatttgaagtaggagagaaagaataagagaaagtgacatttggagacaatagcaaaggaaaggtaattgggttagttaaaattgctatctccaatgatttgtcaattgataatgtctctcttgttaaatctctaaatttcaatttgctttcagttgctcaaatttgtgatcttggcttgtcatgtgctttcttcccgcaagaagttattgtttctagccttcttgacaagtcttgtgtgttcaaaggtttttgatatggaaatctttatttggttgatttcaattctagtgaagcaaatttgaaaacttgtttagttgcaaaaacttcattgggttggctttgacataggaggctagcccatgttggcatgaatcaattgagcaaactttcaaaacgtgatctagttgtgggcttgaaagatgtgaagtttgagaaagataaactttgtagtgcttgtcaagccggcaagcaagttgcatgttctcatcctactaagagtatcatgtccatatctagaccattggagctcttgcatatggatttgtttggcccaacaacctataagagcattgttggtaatagtcattgtcttgtgattgttgatgattattctcgctatacttgggtgttctttttgcatgataagtctattgttgccgagcttttcaaaaagtttgcaacaagggcccaaaatgaatttaattgcactcttgtgaaaattagaagtgacgatggttccgagtttaagaataccaatatcgaggactattgtgattatcttggtatcaaacacgaactttccgctacctactcacctcaacaaaatggtgtagtggagaggaaaaatcgtacattgattgagatggcaaggactatgcttgatgaatatggtgtttccgattccttttggacggaagccataaacaccgcttgccatgcaaccaataggctttattttcatcgtctcttgaaaaagacttcctatgagctaattgttgggaggaagccaaatgttgcatattttcgagtttttggttgcaagtgttatatttatcgaaagggtgttagactaaccaaatttaaaagtcggtgtgatgaagggtttcttctaggttatgcctcaaatagcaaggcataccgggtctacaacaagaacaaaggtattgtggaagaaaccgccgatgttcaatttgatgagactaatggctcccaagaggggcacgagaatttggatgatgtaggtgatgaaggcttgatgagagctatgaagaacatgtcaattggagatgtcaagcctattgaagtggaagacaagtcatccacctccactcaagatgagccatctacttccgctacgccaagtctagctcaagttgaagtgaaggaggagaaggcacaagatccacctatgccaccaaggatacacaccgctctttccaaggatcacccaattgaccaagtgttgggtgacattagtaagggtgttcaaactcgatctcgtgtcgcttcgatttgtgaacattactcgtttgtttcttgtcttgagtcaaaacatgtagatgaagctctttgtgatccggattggatgaatgctatgcatgaagagctcaacaactttgcaagaaacaaggtgtggattttggttgaaagacctagagaccacaatatcatagggacaaagtgggtctttaggaacaaacaagatgagaacgggttggtggtgagaaacaaggcaagattggtggcacaaggtttcacacaagttgaaggtttggactttggtgaaacttttgcccccgtggcaagacttgaggctattcgtatccttcttgcatttgcatcatgctttgatataaaactatttcaaatggatgtgaaaagtgcttttctaaatgatgaaattgccgaacttgtctttgttgaacaacctcccggttttgaagatcctaaaaatcctaaccatgtttataaactctcaaaagctctttatggtttaaaacaagctcctagggcttggtatgaaagattgagagattttcttttgtcaaaggatttcaaaattggaaaagttgacaccatccttttcacaaaaatcattggtgatgatttctttgtgtgtcaaaattatgttgatgacatcatattcggttctactaatgaggtaatttgcaaggaatttggtgatatgatgtctagggaatttgagatgtccatgattggagagttgagcttcttccttggacttcaaatcaagcaactcaaagatgggacgttcatgagccaaaccaagtacatcaaggatctactcaagaggtttggcttggaggatgcgaagcccatcaagacacctatggcaaccaacggacatctcgaccttgatgagggaggtaaaccggtagatttaaagctttatcgttctatgattggtagcttgctttaccttaccgcatctaggccggatatcatgtttagtgcttgcatgtgtgcacggtttcaagccgctcctaaggagtgtcacttagtggtcgtgaaaaggattctaagatatttaaagcattcatctactattggcttgtggtacccaaaaggtgctaagtttaagcttgttggctattccgattcggattatgccggttgcaaagtggatagaaagagcacaaaatgcttggtagctcccttgtgtcatggtcatccaagaaacaaaactccgtagccctctctaccgccgaggcggaatatgtttcggcgggtagttgttgtgcccaattgctttggatgaaacaaacattattggactatggtatatccttcaccaaaaccccactcctatgtgacaatgatagtgccataaagatagccaataacccggtccaacattctagaaccaagcatattgatatacgccatcacttcctaagagaccatgttgccaagtgtgacatagtcattagccacattagaaccgaggatcaactagccgacatctttaccaagcctcttgatgaaacccgcttttgcaaattgaggaatgagttaaatgtcatagatttctctaatgtggcttgagatggtgcaccatggtttcttctttttgcattatgtatatttgctctcatttgctcttatgctttggatttattgccatttggttcttcattgcgaaaatggagcatgtcacattaagggggagttttgcactcttacatgtgctctacttccttttatatgtgagcaaaccaactagtggtgttaatagtattttcaaaatgcccaagtcaacctaagtcaaaacttttgcaaaatcaatgtaatttgaaaactatctgttggaaaatgtttcaaaaggtttcctatatgttttccaagcctcacattgcaagaaaaatgatttttgaataaaaatgccattttggtcctattttaaagaaactagattcttagttttggccaaaatgagatttatccccaaaatgagattgagaaggaatttgagaaaagtttcaaaacaaagttggtagagaagaagatttgatatgtttttggttttcaaacctatttcaaaaacctaatcattcaaaagttatttgaaaatcaaattcgcccaaaaacccctataaaccataaaaggtcacctcctagcactcaagtgagttttgttgcaaatcttcataattttcaaatgttatgaatggttggcaatatttcaactcacacattttaaaattgctccaaaaatcaattttttgttgaattttattgtgtgggggttgccggcttgtgcaagggctgtgcacagccgacaggggcctggcggtctgaccggcgctatatgcgcggtctgaccagccgaggtgggcccaggcagttttgccccttttcttctccatcccgcacctaccctctcccatctcatccccattcatccccaactcgaaaaactctctctctctcaccttccctcaaaccctaactctttcctccaccaaatcccctcggtttgaccgcggatttctctccggttacaccgtaagtgattctcctccgcttcctctctctattccatggattagttcgtgtttttgttgagtttttgatccatggcatggaaccctaggtgaagcacgaggtgttcttcgatttgcactagtagagggtagtttcttggtgtgattcatccccttcaaccggtaaatcactctctctcttgtgcattctctcaaatcaatctatttcaccctagggctatgggtagttattccaatcttgatgaactaggccataccctttgttgttctagttccaatcttgagctatattgttctagcgatttttagactcaaatgtgaagatgtgaaaatttttggatgcttgaacttgtgggaggaggtctgcccagagccataggcggtctgaccgtgggtcagccgccggtctgaccggcgtgtgcgcctggtctgaccggccggcagccgtcagtctgactggccaccagcgggcggtctgaccggcctgatgccgtcggtttgaccgccctactagctgtggtctgaccacccttccacaggatataggcaaattttcacctctccaaattgtttctagaattattgctaatatctatcatcctttgctctttgacagtgatgcctccccgcactcgccatggtcttcgtgcacccactccggatcccgtgagtgagcctgaggaatcgagcggagatgagtacgctcaaagtgatgaagaggttaaggccaatgttgaaagggctagtgaggaggctagtggagatgatgactgtggaagtggagaggatgaggatgaaggaagtgatgatatgcacattgatccctccatccaatttgttgtgaacatgaggaatccatcgcagtataccatcttgaggcaccatgatcagtttttgaggcctcgggacaccccggatccccgttttcacaccgcttcccagaagagtgtgtatgagcaggtttatgcagggaaagcttttgcagagcataagtggatttcttggagagacatcaatgagactccagagtttgagggcttgcaggatctcttcaagactgttggcattgaccggattgtgactctcaaacaagactacaatgaagatttgatccggcagttctatgctacagtgtgggtggctggagactatagtgagatgaagtggatgtccgacacccttcagtgttctatctccaggaggcaattccggcggctcctcaatattcgcttggactttgaagatgacttgcatgaggagcacacccataatccgctctccatagactatctctctcatttttatgaagatggagtgcggtacacacatgggaaggttgccggcctaaggactatccccagtgtggttaacaggattgtgagagctaccatcctccctcgccttggtaataatgatgatattagggggtagcttggcacgtcatcgatgccatcattcgtggccgttagttcgacattgtgtctctcatgatgcaagagatttccatctccaaggagacctttactcagggaatctattatgccccttacatcatgaggttgattcaagacaagcttggggctgttgggcaaaatttgaagaagcacaagcagtacaagccccgccttcagcttggagctccccgtgctcctagggcggcgccctcctctcgtcctggagctagctcaagctcagcacctcctcctcctcctcttgggtatgatccaaatgctttcttccatccacagtatgcttattttggaatgcaacccaacgaatacttcaacccggtacttggggctattaataccctaagtgaaagcattcaacgcttgtctaccgggcatgaagctttacatgaggatgttcgtggcttgcgcacggacgttggagacttgaatgcttccgtggggagattgcacactagagtgggtacattggattctcgagtccaactgttggagagctcccaagcatttgtgtatcatcgttgtcgtgatgctcctcatccttccacttcggcgtgtcctccttctcctccacaagagtaaagacctttttggtgcttgatgccaaaagggggagaaaagagtgctttatgttttgtgggttgggactagtagtagtgaggatagtgccctcatttctaataggctaaggtgttttgagctatattttgtatgggtatgggctattactctatattgtgtgttctttgtcgttttgttaaactctatgtcatttggacccttcgtggtcttgtaatagcctatgtttatttgtgagcccttttaggatgatttgtgacttttgtgatttgattggttaagtgatgtgaacttgtgcgatgatggatggtgtatgcgatattgatatatatatatatatatatatatgaccatcttatgctcatgaatgaatatttgttgaagttcacattgaaatattgcttatgtgtttgtgcttattggaatgtgaaattgaaatgtgcattggctccatatttgttgtctatgattgatatgcacaggtttagggggagcttttgatttccattgcaatatatgtccatgtgatctatgtttgattatatatatatttgtggtgtttgtcatcaattaccaaaaagggggagattgaagcatctagtcccccgttgttaattttggtaattaatgacaaacgctaattgtggactaaccgttgctattgagataatattttaagttaggtgtcatgtgtgcgcatggatgactatcgatggattaaaattgacggcgcaaagcaaagagaaagaagacggtaaaactagtgctttaatttaattgatcgaggtgtagggcgatcaaatttgctagtttattttttagtttcgccgtactattaagaggggtaatgacctagcaaagagatgattttaattgccacattaggtcattatgcatttagacttgtgctcgcttttcatcacacacaatcacttgggatttcactggtttcggcctgaccaggggcggtcagaccggccacatagtggcggtctgaccggcgtgccctggccggtctgatcggctgcaagatggcggtctgaccggcgaataaggcaggtctgaccggcggcacatgcgcggtcagaccgtccccctggaggccgggatggtgctgctcggggtggccgatacagagccgacggagccgtattcggtcagactgaggcgatggtggtctgaccgagccgaggtcggtctgaccgcccactcaacgccggtctgaccggccaggccgatggggccctctgacaacactacaacagctagttttctagccgttgtagagtagcacggtctgaccggccgcatacctccggtcagaccggcagagcacaaagttaggggatttcgcccccaacggctagttttggttggtgggagtataaatactccccctccagcagcaaggggtctctcttggcacccaattcaattgcatacaccccttgcacctctctcacacctacttgagctttgtgttcatccatctagtgtgttagagagttaattagccaagagtcaagtgcattgtttccatttgtagagctagtatggcacttgattgatcatctccacgccgggtcattgcttgttactcttggaggttgccgcctcctagacggcatgtggaggagttgcccggtgacctctccgagaagattgtggaggaggcccggcgccggtttgtgagtggtttggagttcaccaccttcggagtgaaggaagaactaccctagtgatagaggcttgggtagtcctctccgtgggccggctcccgccttgcctaccccttgacgaagggggcgtgcggtggcttcgtggttgagcggtggagttgggctagcctcaacggggagtaggaaaccggcgagtttccgaacctcggtgaaaaatctcttgtctccttgtctcatttgattgtcgcatttacatttgtgcaatttacatttctagagacatacttgagatcatatcaccctaggattgctaaacattgacataggagtgtgatttactttcctagagatataattgagccactatcactctaggtttgcaaaacataacttagttgcttagttagaattcaccctcaccaagcctagcaacttaggttagttttgattaggtgtcatttagttttaaatcgcctattcacccccctctagtcgacatctcaatcctacaaccgggactaaagtggtgatctttaggactaaagtggtgatctttaggacctcggccccctgacatgtctctgacagcgaatgaaccgggactaaagatcatagaatggctatggggtttttaaccgaggctaaagatcatagaatgtctatgtggttttgggtcgatccagtaaagatcatttctctagtagtgcagcttgctatatttgatataaaatttaaacttatgagttgttatattttggtatggataaagtataaaaaaacatgttggagaaatataacatgcctacttaagcctcctttggattgaggctttttaaggaaaaattcaggattcaaattccgatttgagaatggtatatgccttaggaaaacaacgaagaaaaaacggagggaacaaaaatcctgcacctattatttcatagaaaaagtgcatgcaaaaataaatccatctagatcgacctatttttcctcttgccattgcataagatcaacacagggtaacaactgtgtgattgtcgtgggcttgtggccaattgccaacagcgtggaaaatttagttatgacttattgtgcgattttttttattcctatgtttcaaagaagcaatccaacaaaattcatatgttttataattatttgttttacacgtacaatcatattcagtactatgtttcttatattcttaccttcttactatcatgtttcaaatggagcctttaatttagtgtttcgcatacaagctgtgatgaaagtagaaagatatttaagtcccgataaaacttttactatatcaagtttttgttatagaaattccatggccaatcctttcaaccgctgaaaatttaattgaatgtttagcgacgagcccaaacagcagccaatggtagccaggcgatggctacgttgttgtatacaaggttttagaccaagcaacctagctaagagcaggtacaatagcagactattagtcagttacaagtatattttaatgagataaaagataagagagaatagcagcaggctatagatctgcagccagctgcagtacggactccaagacgcaatgtatgtatgataggtgggaccatatactaatagaatagtagacaactattgtatgaattagctattagattggctatagatgaattaaaactagtagtggactatgctattaaacttgctcaaacacagtcagagatgaacagggttatattactttatcctcgccgtagcctcggctatcttctcttcgacttccataacttaccgatgatgctggatcaatcatcgaaaccctgtattagttatcattacctagtttgtgcttgtgcttccctagccaccaccaccatctatggtgatctgtgcttaaattctttccactgcagaactgcaccactgtatccccacacctttgcgtgagccaaagctataagttttatgctgtactacgacctggtttagggcaagtactataggcatccaagcacaatctcctaggtgtcacataagctaaaatagtgaggcggaggagagaagagatgagagagataagcagccacctctcatgcaagaggtaaccactacacaaaattcaagacaaaaggagagagaggaagagtagattgggcaaacaaacattggggctagtgtattagaattagtatagatttgatatattgtacatgttacctctacatttattagttgatgatgtggtcaagattagatgcaacattcacctcttttataaaacttgcccttagtacccaactttttcttcaaacttccaactttttcatcacatcgaaactttcctacacacaaactttcaaattttccgttacatcattccaatatcaatcaaaattctaattttagtgtgaactaaacacacccgcaacgtttgaagattggaaatctggaatgatgcttagcttggagttttctcggagctatcgtttcgcttcttcgcggaataagtgaaaggttatatttacaaacgaaaagtaatctatgaataaaatttttatataggtgttcctagtgatctaaaagtaaatgctgaaaaacaaattttaatgagaaaaccacaaaatcaggtccaaatctaagattaaaaatttaaattttgactgctaagcataaataaaagcgaaaagatgttacacgaacctattcagaaaaactacctaacggcatcccgtggagacgggatagtagtactgccttatctcctcttcccctctctctgtgtctcttcctctccactcgctctctctctgtctcttcccctccactcgatctctctctctgtgactaccacccatgagcatggaggcggcgatgacgatgacgacgacgacgacggtgccgtcaccaccagcccccgcggacgacctggatgacagccggcagggctcccgaccaccacgggcgacggccaccgtcgagaagcctccccatcaagctcctcaagccgctcctcctcttcgttgttcttgtcgctggcttcctcgccgctgccaccctcctcctcatcggcggcgctggcgcctcctacggttggggagcggtggacgcggccaccgggggtgagcgcttggcacaacatgagtgatgaggagctgctctaggcggcgttgatggagccacaggttcggcggtttggagcgaggcacgatgacgagcgacggaatggcacaaggtaggcactagatctatcgcctcctcttcctcttcctttgccgccgccccgctgctcgacctccccgacccgcgactcctcctcctcctcctctctcttgggatatcacactgatacctaggtatcagctcgatacccagggtaccaggtatcagtcgatacccaggtaccaaggcctgatacccagataccaatgcttgacacctaggtatcagctcgatacccaggtaccaatgcttgacacctaggtatcagctcgatacccaaggtaccaggtatcagtcgataccagggtacgaggtactaggtaccaactgatacgcaaggtaccaagtatcaggatggagaggaggtagaggttctagagcatgttgccgccggcgttgtggtgaccgagacaccgagaccgctggcttcttctgcttctgtggcagcggaggaggagccacctgcgctcaccggcaatgaggcgacgggagcagcgggcaaggacgacaacgaccttggcgaggagcgcgagggaggaggggagaggccccggcgccggcagcgacgggaacgctagtggaagaagcagcgccacagcgcgcggaggcggcaccgcagcgggcgaaggacgacgtcgtggatcgtgccgtcgttgtccacggccgccggagacgacgacgacgaccccgccagcttcatctccgcctctcgttattttctcctgtgagagagagagagagagtttgtggaggagaagggaaggagataaggtagtggagatcttatcccgtagcaacgggatcccattgtatagctgtcctcgaacctattccaccgccacgcgagcaagggatgccattttctttttggcccccgcttgcagcgtcacatgcagccacgcgtatgctttttctcttcaattttcccgcaggagaacgagagaaaacgcaccgttggccgcgtatcagggattcggggcatcaaggtccaatagctgaatagcacatcgccatcacaatgccagcgcctctcccaggtgtcggaaccggagagagggagagatagagagacctggaaggctggaaatcgagagcagcgaggcggcgaaacaagcaggcggcccggctctcagtctcatcccgtgcctcctccgcctccctaatcgtaagcgcacgctccactccgattaccttgtgttggtatttttgtactttcgctgtagctgctgttttttgggtccgaatcgagctgaggggattaggcgcctaaattacttctgctagtttcggattttggatgttctagtgcaaaacggacggttggatcggctgcttgttttgtgcggttcgacggaactgtggatgtcgttgtcgatcgagcgatcgatctatcgcgcgtgtggctagaaccgtgcgttcagctgttgtggcattctgtcgaacaccttatgatcaaccatgggcaggtgcggcttatagcaatttcagtgtgctaactggaattagcagcggcctgtaggctaaaacggttgtttgtctggaaatccataccctccccacatcctccccttacatgcagtgattgttgctgatctgatggagtgtactatcttctttcgggatgctgaaagaccatggaaagctaatttaaaacatccccttgttatgcagtcaattttcagatcatgttttggaaagccgttaaattttcgtgcacactgcacagatttgtccgtcaatagttttcacttttgcagtttgtcatgcatgttgacgcggtcatccttgttagcctactataattagattggtgcatgtcgcgtcagttactttttagttaacccgctgtttaaaacagtgtgatggctgcacccacatgcaaatgttggctgatatccaatttttaggaccagacatgccaaatttgccaaaacatgttgaaaattgtggtcagtatgtcagttatgatctatcataatttttcgtgccatttttgcttaaacaacctcattcacttgctttagcagtattctttattaaaaattatcagtcattcgtgtgtcagatttttatctaatagtatctttcccctatgaaagtgcttggattctcaactggtttttgttgttacaattgaattgcaataaccatatcactgtcaatgctctgatgtaagaataatgtaagagaaaaaaaagaggaggaaaatatggatgcagacaatctgtgcagctgtgcttctaggagagtgtcatttaccttcaagtttttagaatttgctcatcttcatctttcattaaaatacatgattttttttgtgttcttccgtagccatgaatgcatgctcactctatagttttcttaatttattcttgcaggtcaaccatctagatgtctcagtcggtgcaagggtctttttgttagttactttgcaaagttaaacttgaaaatttaaaggataaaaaaatgtccaggactgcaataattttgcatcgatttcgtcaagcagctgccagtcagagcctcgtagagacttctcttcagtcatgcccatattttggtgttcctctgagatggttaagctgcacagagcaaacttcaaaatgggaaacttctacatcttatcagattgatgacgtagatcaatattcaccaattagtagtgtagcaaaaatctgcacacatcccctttcatctcacgtaaaccactgttatcaccacagtcgttcactgggtttctcaagtgtctcaagttctcgtcgcatgtattcctctgatgctagagccaagccagaagattacaaaaatgctatggccaaagtttcttctacagaaacttctgaagtcggcgccacagatcacagtggcaacacttggattgatattttagatagtgcccgtcactctaccatagatgctactgcagccgcacttaagaaactgaaggcgatgactgatccaattgtaccttgcatccaggagttatatgctacctatccagatctacagaggatggtcatcccacttggtgggacactgatgggtacagcagttgcatggtttgtgatgcctattgttctaaggaagctccacaagtacacttcagaaaatcctctcataacgcttgaaggggagtcaactaagaaatacatgtcctatcaaacaagcttgtggagtgcattggaagatcctgcaaaatgtattatcacttttatggcattttcacagatgtaggtccaatttcacacttcaaggagaaatttattcgtttgatgcatagtattgttatagtacaggtgctagaaatgacatctaaattcacctaatcttattctaagggaaattccgaaattcctctagtgtatcttatattttttaacaaagatgctatatgatgcatttcacacttgttttgtcctctaaagcatttgtctgcagcattatgtgcaagaaatttgttggcaaatatatgttcttcacttttccttacagattggtagcatgatgttattttcttcttttgtacaatatgatacaaattatagatactttcttagttagatataaatatgtaagtgaaatgatttttagtgctgtaattcgttctgtatgtatggaatgcatctaattctttctccttcttcagggctgcaattgttgtgccaagtatttcagtttatcttccacaggcatggagaggaacatttgttgtatctcttctgtggtttcttcagaagtggaaaactaacttcattgctaatattatgaccaatcaatctgctatagggatggacagagacagattgttaacatttgataaggtgtcatcgttagcactaattgcacttggaggaatggctcttgctgaagcttgcggtgtacctgtgcagtcaatattgactgttggtggtgtcggaggtatgctcaagttttcaggaaatagtacacataagaggctgtttgtttcaactcatacttatttcttttcatgacaaattcctcttcaatctgtattatggtaactttcctgccgataactaaaatctggataaaatgtgaactaacagcttttcctttatgcttctctaggtgttgctactgcttttgctgctagagatgtcttaggtaacatactgagtgggctctctctacaattttcaaagccattcttggttggggataacataaaggtgcatgctcattttttggaaccatgaatttatttttacataaaatctgtatgagctaccaagtttaaagtcttgattcttcaaatactctggatgagacgttctcttgtcttaatagctaatatggtggaaagttcagatatatgttttttattatctagccaagtcacggtctgttaggaagataatcattttacgacaacaaaggagataaaaaacgttggagatttaaataaaaaataactcaactacttgataaagtttgaaataacccatcctatctcaagcatgtttcgattaaatgcatcctaagtctagaatagtgcattatgatttttgttctttcagaaaaaaaaaggtgcaattgattcaactcttagaaaaaggactaagtattgaaaccatccaaaattgacttgtgaacgctatatcctggcctcctgtgtaacatcagattcttattggacttttttcgaagagtgagaacgtcaaactatcagtggaaggagtaaatgtaggcttagaaaaacaaaaacgttcactaaaattatcaaccattcaatattccataatcctgatcagcaagcatgccttgaggtgtctctttagctttgatactcctatatcgaaattcagagcaataatacctgagtaatttgaagttctttccttctgcaggctgggtcaatagaaggaaaagttattgaaattggactgacatccacgttattgattaacccagaaaacctccctgttgtagttcctaactcactgttctccagccaagtaattccacctttgtggtgattctgttttacttttgtttcctgaaagacaatgctccttggacatgatttccatttcatagaccattgttttgacactgcttcatgttgaccctccatatgatttcgtctgatgatacagattatagtcaataaatcaagagctgtgtggcgtgctagggtggtaaaaattcctgttataattgaagaccttgaaaagattcctactatatcagaggagataaaagtgaagttaaggtccaacccaaacattgatgctccttactgctatctctcacggttagaaagttcacatggagagcttaccattggttgcaacatcaaaagcatggtatgttaattatactcttatcatagttctgacaagtttggaatattagtgattgcaacatcaaatgcatggtatgttaattatactcttatcatagtttgacaagtttggaatattagtgatttttacctctcttgcacttcgatgtgaaataaatcagggcttcacaagcacttgctatggtaaactggtaccgactggtatgtcctagtggtatagtctgcactgatgtgtatgcatgtttcgtacacaactgcatattgacacgagctctacagagaaccatggtttcgagcgaagtaatagaccgtccaaaacaacacacattattcactatagtaggaacataatgtcataggctccagcgatgtcttgcactcacactgcaagaagtctaggagctcccacagcacagttgttgactgcttcgtaagagtaggacaatttgtgtattttgttagattttgtcaaatcttgggattacatcatgcagttttatgttagttgtttacagataaatgcatttagagcattcaaaatgcagaatgactatgttattatacgcacctcagcctttcatccggaatggaggagagatggcgatgagataagagagaatatatagtgaaagtctctacacatccaccaatggagatcacaaaatgtgacttgacacatattcgaggaagaggcagaaaaagctagaaacagtgcgttgtattgtaaaagttgtttctacaactctttcaggttattatggcaaaagcgctttttacgttgtgaaatgctcttaggaagcaaattaacaaaatgactgctctttttagtggggcttaataactcaacctgaacttgatgatgtgtttataaagagctgttcttagagagttagaaaattcatttgtattctattttcttgattactctaacaatatttttatgatacttttgtagagaagagacgaatggacaacagtggaacaagatattcttttgaaagctgccagcattgtcaagcaatacgaatcttgaacttgcgagcacattacagttctgttctatccctctccattttactgcgagaagaggttaaagtggttactctttttctagtttggtatgggtatatgggactgtaaatagagttctcatgtcccatactctaatgttttgatcacatgtgccatatgcctttcctatttaaggaagtgaccctttgtcatcctactgttacatggatacaagaaaaggagatgaaagatgaatcacctatgcacttctgtgttctgtccgcctaatggattatacttggctgaattcccaatccttgcatacacccacgtctatggtcatcgtcttgtttccttcctgtcctttgggagacgacagcaccctgcagcaatttcgcattggagactgcagattcatgtaaaactgacagttaatatactttgtacactgctgtgattaaaaattgctcaatcctctgttcataaatcatcaatgtgagatcggtgaggattacccggtcccataagccggggtcaggtttcttgagcacgaccacggtgtcgagcagcgcgtccgggtcggcgatcttccaccggcacggcgggcgcatgtcattgcggtggcgccaccgctggtacgtcgtcacggtggtctccccgtcgcgcgccaccgtgcggcgcgccgacgagaggtagtagaacgacggtttctcgcaggggcggcgcgccaggggcctcgtgttgaaggcgtgcgccttgtagtccgcgcgcttgtaccagttcaaaaatgtccgcgccggcagctccatctcccgcgccgagatcatgcccctcgacgccatcaccacgaacccccacgacacggacaccgtccaccggttgcgcgcgtcgtagcatatcgactgctgcacggcccccgccgagtccagcgccaccggcccttcgaacagcctccgcaaagccgccggccgcgaccgcgcgttggggaagagcggccgcaccacgtcgaggtggtgcagcgacacgagcggcgccaccgggtgggcggcgaggaggccgaggaggtcgccgtacacgtcgtactggtggaaccccgggtgcctcgtgagcggcacgcccagctccgccatgcacgcgtggatccggtcgtcgctcccgtacagcgacgggtaccggtggatgcaggcgtcctgcatccgctccagcctcgccgccagcggctggctgatggcgaacccgccgccgccgaacgccatcccgtacgagaagaagatgttctgcaggtggctctcggaagggtagccaatgtagtacggctgccggtgatccagcttctggaggaccgcgacgaggttgtctggcaggaagacggtgtcgtcgtcgcccatgacgtaccagcgcacgccggagaggccgaggcggaacgtctcggagacaatgcgggagatgcggatggcggagcggtggccgcggcggttcttgtaagggaagccggaggtgttcgacgagatcttgattggtggcagcccgtctggcacgccggactcccgcaccggctgatccatccacacgaacccgcgcattccggcgttagggcgccaccagatcttgatataatccttccgcttctcccacagccgagcggacgccgcgatgccgaacaccacgtgctgcagagtcgtcgccgccatcgacaccggggcgggtggcggcgtagacaaggaggacgacgacggcgtgtggttgcgggtggtggagagttgggacagagaaacggaggaggtgacgatggggcgatcaagtgggcaggacggcgtggaggagagaatggcgtggagggtgtacaggatgtagaggacggtgaacggaacaatcaagatgatgaggtagcggaggagggtggccgcgagggtctccttgccgccgccgccggtggcggcggcggccttcattgcgcgcgccgtctctgaccgtctttacggtttcacctcctcgttgccgttgccgtcgccgtcggcggcgaaaagcgagagctctcctggcgagaggaacggattggattcgctggaagcgatagattttcacggggaatggatcggattgggatggcgtggcgtgagagctcgtcgggtcgcgcattctgctcgcgcgccgcgcgtggcgcgtttgatgggagcggtttggctcctcctcggctccgtttgtttgtttcaagagatctccccctcttcggtttcgattcgcagccttcgctccgtggacctcactggttatggtttcgtgggcttcaattcgtggttcatgggctttcagaaacagtaactgggcagcagatgggctcatggcccaaaccagtagaagagacttggactttgagcccagcagaaaagagaaatagtcgctctgattccgctctaaggctgaacctgcggtctctttctccggacggacaaacgcccaatcttgacaggcacaggggcgagagagtgctcgggttgtcactgttacagctaaaaaagcatgtgattccttcccttgtcgtcagggcgaggcacatggatcatgagatgcacaatatctgtctgcgggtggcatctgtgtcgagtgaccaactgaccatgcatggtcaagttcgggagtcctgctgctagagtgtctctacatgccagcacgcatctatatatatgatatgaagtatgtccctcttgttgtttcaagaaggctgaagtgatgcagatagtaggattttattgtttatgaagttccttaaaaagaaaaaaagggttagatctctgctattcaatctactacagtttgtagtgggtcacttgatgtcctttgaactgtagtcgtaccacttgagctatcggaagagattctgtagagatcgtccttagatttcttccctcgtagacaaactcgggaaggatattggtccctttctacggggtgaacccgcgacagcgagacgggaatcgggcgtagtccacccgattcacggcacgtcgaaagcgtgttgggcctcagttcgcttgttaattgctggcttgctgcttctcaggttgaggaatccaccacattttgccacacgcgatgggttcgtcgctctaactgtgacggaatgacacgcgatagtacatagctgctctgccgatttcggtgtagtgtaaagatgcgaaggcacgaggcggcttctggacttcacttgtcacttgagatttcttcttgtttattatactcgtataatagctgtgttgcgtgcaggctggcagccgcgaaacctacgatggccgccgcgtgagcttacgaatgttcgacgcagctgcacggggacggaattagattagtgcccgggcgtggctgctgctgccgctgcctgcctggagccggtagtctgtcgctgtcgagagcaacgcgttgaccggatttagccgcatatttaatggatgtgctctctatctacccgtccgtcctgttagccgcgcgatgacgtgagtgaaaccggtcaacacaggccgtcggtcggttagatcacgcgagatcttcgtgctcagatgaggtaaaactcggtgaccgttcagaatcggtgagccaaaggagacgggtaagatttgaatagcgtggggagattggattaaacggcttgccaaattagcaagcaccaaactgtggcactgctctgcttcaacaaatttaatatactactagtaatctgcaaaaaaaaaaggattcacaacttcgcaggcttggaaggtggaatcgacctatatagcagcaaactattcctacttgtgtttttttggggggagttctccttggcgcctatgtacaaatcaggacgcctatgtgcccgtgtgccgtagttgaggcagctctgtcatgccggttgcaacgaaattgaccggggcggtggattggcgggctcactggaaaccgcccaagccgttgagcagcagctcgtgtggtcgcagcagcgtcggggtgggcgccagcggcagcggggatgggtagtacgagaggtcgtagtcggaggggtcaggcaggccggaggcggcgggcaagagctcgtcggggatgagcggcgcgcggcagagcgggcaggtgcgctgctcgtgggccatccagcggtcgaggcagccgcggtggaaaacgtggcggcagttggacagccgccgcacctcgtcgcgcccgcagatgccgctgaggcagaccgcgcagtcgccgccaccgcacaccgccgccggggcggacgccaccagctcgtcgaaccgcaccacggggagggcctcctcgatggccatcggcggaatcgccctgaactcgggccggcggtgctggagcgccgacgacgacgcccaaccctccgccatcccgccgccgcgcccctgcagcatcaggtcctgctccgtggccgccaggccgggcgggttgtcgatgaggtcgccgaggccgactgcgtggaaggcccagaggagaaagcgatggaggtggccgaggaggaggagcacctggagcagcagcctcgggaggagcagctccgagtagcccaccgggaagcccatggcgatcttggatacagccgaattgtgagctgagctgaggtgagcttgcgtctgtgcggtgcgtgcgtggtggggaggggagtgagtgaggaggcggcgttatataaaagcggggaggaggtgagggaagcagaggagaggagagaggggggcggagaattaacgcggaaagatcgtcgaggctggggggagtcgctggttggttggttaccttgttggtttgtgcgtgcgcgtgggtgtgcgtgttgcggtgcgggtcgtgggcttggcttgggtggactggactggctaggcgcgcggtcagtagcagagtggagtagcagcaaggcgtagcagcgtgatctgctttagccgtagcaacatgcctactcctacttgtgtaggtaggccctccccgtccctcttgcgtaagtaggccctcaccgtccctgcaggctggctgcaaacaccgctcccagtttacttcggccgcctttagttttaaagtttttcttcaaactttcaacttttctatcgtatcaaaactttcctacacgcaaactttcaacttttctatcacatcgttctaatttcaaccaaacttccaatttttgcgtgaactaaacacagacaaaccgatgaaaaatttgttgccgaggactcgtgcaagttcgcggtaaacctggtaagattcttacatctagcataacgtccatactgcacgttacatgtgacaggatgaaattgagtaggctcagttttttttgacagcagcagtgcgccctacctcctaagaagctcaagggcgtccacgtaggaaaatgcaaacagggcttctatatacacagtgcgtggagcttaatgtgggctcaccaaaaaaaactttttacccatatctgttccaccacgaaagcatttgttgctttctccgccgctccttcgctccttccccctctctctctcgctcacacggcgacctccgacaggcggcacagatccagcgccgcttggaagaagaagcgggcgcttctccccttcctcccccccccaaaggatctgctggtggcgaatgggtcggcggctagtggcggcacggatcgggtcacgacggaacaacgacgacaacaaggtcaggcgccagatccgctgcctcctcttcttccgctaccgccatcttcccttctttcctcaggatggtggcctcaccggcgaccgccgctgcatgggatgtgggggcgtcgcacgaggccatgcctctccgaacgtgtcgtccgacccattcctcgccccaccctgacaaaccaagacataaaacgggtggttcactttggctacgcggtcctcaggttggtagcggcagatgtgtatctggagtggaatctccgatgtggcagcccggggccgaacgccaactaagcacattgtgaatgcccttatggaactttcttcggtatttatttatttatttatttttctctattacttgatattattttttagcgatgcgagacagagtaataccagcctttgttaaaaattgaataaatttcgctttaaaataaaaaatagttcaacggggcaaatttgaacagagtgaggtaagtgagcttttttttaatagtggatccaattttcaattaagtttgtaagtcaagaatataatatataaacaaaactaaaacttatacaagcatacaatattctaaaacttattcatatgcaaatgtacaatatttttctaaaatctacaatcttacgagaccatgtctggttgacaaataatcactaccggagaaaccatctttcatcggtcgtccaaaaaccacaatagtccgggactaaagattatttttattccgagttaaattttttttttgaagatcaattttagtcccagttaaaagaagttatcaggtctactcaggccctaattaacttagtcccggctagtataaacaaccagaactaaaaatatatctttagtcccagttgtttatcccaagcgggaccaaaaatcctcccgagcaacgcgcgcgccaagtcctctcttggggactcaactggtcttatcaatccccttccccttcctctatctttaatatcagccttatcccttcctctcatcttgatgcaacatcggccgggcacttcccctctcctctccccttcctccccctccccgccaagtcctctcctctcttgctctttgggtcagcggcggcggccgagcgggagcggcggtggccgggcgggcgcggtggcaggggaggcgcgcgcggcggcctcgcgctcccctccgccagatccggtggcggcggtggagcggaggggatggcggtggcagcgacggccgtcagctggcagtgccctctcctgcgggtgcgcgcatgcatggaggccggccgggcatcccctctgctggagatttgtcatttctttctcttttttttggagaatttatgtttcattgtatggattgagatgaagaatttgtgattcattggatgaattgagatgcataattcttttttgagaatatgtgattcattgcatggatctgagatgtataatctatgatgtatttgatttgtgatatttgagatgttactttgattttgggtttgatttgggaatatacgtcccactcgatttgggagaaaatcacttagggattaagtagtaagtagcaaaaaaaatgaaaaaaaaagagaaaaggaaactaaccgggactgacgctgccctctttagttgggactaaagatccaactttagttccggttatttcactcggattcatagccccggttgaaaggttctcaaccaggactacaaaaggtttctccagtagtgaattttgccacacattcttccgccagatgactatccatagcatttccatactttcgtggcaacaaaattagccaccaaccttaggcaaagttggacacgaagttaagggtgagttcggatcaactgtttggataaatttttcggtgacacgtaaaacaaggtaaaccgttagcgcataattaattaagtattaactaaaatttagaaatggatctatatggtttttttaaaagaaacttctttatagaataatgtttttttagaacccaccgtttagtagtttgagaaacatactaatggaaaacgataaatcaccctttggagttataaaataactccgctagtctatcacaaatggaccaggaatctaagaagttatatggactgaccaacaaccctaagattaggagtggcacttagtttgaaaaccacaaataaccttatagttaaaatatacgaagttggtttattagaagtaaactaatcatagtccatctttctactacggagggtgtatttggttgagaatcacactttgccataactaagatcggacaagtttttggtagctataaaaatattgtggataaatatattgctaaaccacaaagtgtggataaagttgatgagaaaattaagtctataatgtgtgaagcatgctattaaaaaaatatacaagctataactatggcagtgaaccaaatatatacctaataaaccgtgatagtaaaaagtgtgatgttacaaagtatgcctataaatcaaatacttccgtagttttaatggtatacaggtagagggagctaagaagggggccgatgcgagctaaagtggagaaactttgaccttgtgactttgtggggggattggggctgcaaagccaccctaagctcactcatcaaaccagttttcagtaccactacgtattgagcttgatgtgtttctttcatcaaagtgatctttttattgtcaggtgggacgacatgtctttttgttggattttatttattttttatacaaccgaagatattgtaatttaagctttttgtctctttacacggctaatttgctcacagtcaaccacgtgatacttaacaaaatagccatgtgaaaaactttgcaacctgcaattagttctatcagtattcacttttcttgtacgtagcattgaattattgaagtgccacaaaactcataaactaaaacaacctttgaggttgcgtccgtgctacaatttcctaatcttgactgccttatttttttttaaatgtccgcgcttctcaaactatatatttcttttaaaaaaaatctatagaaatcatattaatatatttttaatatttagttaatacttaatgaatgatgcgttagttcatcgttttattctgcgtgccgaaagaaatggtttccaacgcagcccgagattcttccacaagtaaaatgagtttactgtaaccatccaactgatctatacagttaaaatatatggagtaaaatacatgggcgattcttaaatttataggggtatgtcatttagtttcttaaactctcaaaaatgcatatataagtcccagaacttgtcatagtgtgtcatctaagtcccaaatcgccacaacccctataagaacctacgtggcgctgatgtggcatgccacacggacagaacgtggcatcattttgactaacaaatataacccatttaaaaattttacttttaccttttcttctccttttcttatccttttctccttcttctctcttttttttcctttcttctcctttgtttgtgacccaaatagaagaaaagaaaaaaagaataatgagaagaaaacgaaaaagaaaaagaagaaaaaagaaggggaaaaagaagaaaaatgacacgtcaagtccatatggcattgccacatcagcgccacataggattatatagggattagttgtgttgatttaggatctaaatgatacactttaacaagttgtgggatatgaatatgtattttaagagtttaagaatctaaatgatacaaccctatcagagctatgcccggatgtgtggatctggattttctcctaaatagtagaattgattatttctggatcgaagatagtctactgctggggggtgggttgtcctgtcgggcataaaaaaggaagggatggttgatggttgcggggaaggttctttggattcttcaggatttagagcggggagacgctagttctagcaggttggtcccgtcccggtttgtctcgtcgcagcaagtcgcaagttagccaatccccactgggtttggatgtcatcatccgcatgctttcttaggcgataatttgaccaactttctctgatcagggttgctgcttccacttttcccctgattcagaaatcagagcagcaattcttcggaaagcatttggtcgttttagtgaggaatttggtcttgacttgagttctgttccatttaaactaggcacctcaggcgaaacactggctctttgttcttttcttttgttctccttcgtttgtctctctaatttagaactaggtcaggtaagctgaagacgctaatgcctgtgatttgcagatgatagtatattattacttttagctcgctgcagccttctgattgctgaagctaactttatggccacatattaaaagctagcccaatgctagctctcaataaaacgacagagggattaagcaccatgcatgcatgccacttgcttaattaggattatgttaggtgccggtaggtgacaaagatgacatacattggcatcgctccagcgatcagcttgcagcctccctcttggaccggctaactaatagctagcaggtctttttttcctcctcgatcggcatttggccatttgcaaattgcacacttgcacgtacaataccctaatttgagtggctatacttctatctcgaaaagaaggtggcgtgccccgttctaaatggtcaggcaagattttttttttccttttaataactatgccgattttcaggttggccatcgattctctctctctctctctctaactgtcatatctagcatttgtggttggttgctatgtctgaagattcagatatgctcgcaccattgtgtggctaatacaactctactaatggatcggagcacataactaccattgataatattggttgtttgtgcgtcaattgtgggttactgcagtttgatcccatgactgctgatcgacgcctaaccagctcagattttcactatagatgaacgtctacgatgccaatttaagaccagcaatggctgccaaagctgcttgtcgatcaaagttattgcatgattaaaccaaaccacttgagttgtttgcacacatgaactggttaagaaagtactagctagtactccctccgtttcacaatataaatcattttagcatttcccacattcattatctagattcattaccatcaatatgaatgtggaaatatctatctagattcattaccatcaatatgaatgtagaaaatgttaaaattacttacattgtgaaacggagggagtagtaggttgcaaaggtaggcgagaatttggtttggtgaagaaacggacggaaagggacgtctatggccaagccagctaggccccagccggcggccggtcaatcggtccttgccatgacttccagagtctctccagctgctagtgccaagaaacgccactgacccggcggcggctaacatatacaactcctactataggagtagtaaacatcaatagtacaacctactcttgcaacacactcgtcggcttgttagctacggtgaggggtgatggtaagaaaattttcgatcgtgccgatgtcgttcccgtaaaaataatatcatttataacaatttcagattttgtcatataaaatttagcttttttatttttaacacgatcgtattgaaatcaatgctaaatagttaaattcataaaaatataaaactctgatcatatcataacataacagttttcctaaaagttaaaatgtaatattgtttccgactattttcagttatgataggatatgaatggaagtgtcagctgactgctaaatgagaaacaataaggcacgataggcatgagagtttggctatagctctcaaacctagccaaaacgcatgtgggacttggcgagcgattggttgctgtcttgtttggtccgtcggtcgcacatccaaccaaaataaaggcaatacgatgatcagatgacaaattgacaatatattagttctcttgtgatgacaatatatgtcgcaggcatgcacacatgcatatcatgtgcgtattttaagatgatgtggcactcaatcagatatgcacacttgctagtagcttagttagcactataatgtaattactttccggccggtaagcaccatcaatatgacgcttgagtggtgtgtatataattttagagtgaattgtattttaaaccatatttttattactaaagtttactttgaaactatccttctttttaatttgatgaactacgtaagtttgcattgcctttgtcatactttagatcactccaaaacacttcttcgcggcatcaaagacctcaagcacatcaactgtgacacgctaacgaactctcatacttcctctgtttcacaatataagtcattttaacatttcccacatttatgttgatgttaatgaatctagacatatatatctatatagattcaataacatcaatataaatgtgggaaatgttagaatgacttacattgtgaaatggagaaagtacatatatgcatgtccttgtttaccggagaagaggctacatataactagagaagataattaaggtggtcctttagtatagcagggaccacacaccacctccgatttgccaaagacaggcagaatgtgcatcttgcttgtttcaaattgtgttgcaggtaccaagttagaggcgcggccggttcaaacccaagaacgttcgaatggacaagtgacggtcaaatggttgcttataaagaagaagaggttgtcaacgaagcaaggtggctagctagcaagtttcgattgagggtcattgcacatcaagacgtggcgttagggggaccaaagcaaggaaagcagctatattatgagtaagagcttcacctgatggagtagtcccgaggatgcactggtggagaaaccctttgtagtcccagttcgtaacccccctttagttccggtttccaaaccgggagtaccaatccgggactaaagatcgctatctttagtctcgggtgaaataactgggagtaaagatcgatctttagtcccggttggtaacaccaaccgggactaaagatcgagctgaccttttttttttgcatgcccctgttgctgcatggtttatatatatatatatatatatatatatatatatatatatatataaaccatgcatatatatgtttcaatacatatatatgcatgcataatatatatgtatttatacatatatatgttatgcaaatgcatatgtatatagatatatatatgaacaaaatatatttacattatagaaaatgtgtacacatgcatatagaaacatatgtagtcatgtattaattacaatccattatatgtcctagctagctacgatttcgacgtagtagtactcgctgctagctcagaagctaaggaccggtgaattgtgtttccgtcgtagtagaattcaccattgggatcaaggatttcttcgttgatgaatcccatgagttgttcttgaaccgccgcgataaattccttgtgtgtggtcaggttatccctcatgcgaataaactatatgaatgtatgaaattgattagtaattaaacaagaaatcgctacgtaatgaaattttgaatttatttgtacgtacatcgagctctcttgtggtgatgatttggtctgcaaggcagtggcaatactcgcacacgtaatagccgcacaagttagttccctgcttttgctttgcgcactacaaataaatgacaaacaacgagagatctaattaatatacacttgtatgtatttgaatcggagaaatataaatgtagagcatgtgtactcacaggaaatttgaacttccgcctaagtctttctctccatttgccgcggaccaaatgacggaaccgataccaagccctacatggagtttaaagctatgattcgtagtagcaattaacataacaagattttcttaattaacaaaggaacttatgacggtacctgtctataagttcgaaaaccttgtcaaacgtagactcttttttatccattgagtcatatacgttgacggtgcaggcctccaggtcgatgagtaaaagcacccagtggaatctgcaatgtgcgtgggatgcattacatatgaaacacttagcaagttcgtacgggaatgaaatttggtatgtaggaagacagtaaaattaaactaactctgtgttgtatggcaacagtatgaacgtcttgtaatgctgcgccttcaggagatggacgagattgtcctctgtttcttgtggatattggtcgagcattgcgacgtttactttctgagggtcgatgaatccagtatcgaaaaccctccgccgtcgggccctttgaatctccattctacaacgataaaagggagtatattattttctatggtctacttatatacaaggacctaattaattaaaggagacgtatagtaagaaatctaactgaacgatatacttacaaaatccagcaactcataatagagacgtcgagggcgtccagctggtatagttcgtagattcctctgaaattgatccagagaatgtcatctccttgcaagaagtccgtgtccctgatcctcgctccgatcatctctctaccggtggcgctcatctccatgtacagctgatggaacttgtacatttgtgtgggtagggactgcagcagctcaggcttgacaagcggtttaccgagttcgtacatgtatttcacttccgccttttcgattggtgcgactcctagcaattgatccatagttagaccggtgtcagtaataaattgttctatcgtcatttctttaccggtcaccaacggctcgatctcctggtttggttgctctccaagctgagggactggtttggactttccagaagatgttttcttcagcgttcgctcatagttcgatagcttgatggcctccttgacagatgcagacatacccctgaagaagttcctgacactggggtctatcggaatcttcttttctggacttcgaggcttgaattgtctcttgacttctgatgcaacgtaagcgtcaagctcctcttgcgtgcaatcgtaccccgggtccttgttcttggcggcgtcaactttcgccttctttgttgcccttgtgtgggcaagcggtggagctgggggggcccttgactttgaaggtgccggaagaggagcttgcgggggagtaggtgtagaagcacgaggaggagtcggtgcaggatcctgaggaggagtcaatgctggagcctgaggtggagacggtgctggcggagcatgaggaggagacggtgcaggatcctgaggaggagatggcggagccggaggagatggtgcacgagacgccgcttgtcgcccagggaggatgatgtaccgcctgcgccatagaacaatggcatggcatgtgtctcgtagatgcgtctcaccgtctcctccagggtaatccagctcgaggtcctcgtacgcgccttcgaccaactcaacttcgaccttggagtatcctgctggaatcggcctgcagtggtaagtacctgaagggtccgttgggatggccatgcccgacgccaccttcatgttgtgagagattatttattagtaatcaacatatataagcagcaactagcggaatggctaaatcttacctttattgataagttcttgaaaggaatatgcagctcacatggtgtctgctgagtgatgtcatcaacgggacaggtcgattcgtcctgtgtttgcatggcgtccatgctctgtgatcctacctgccccgttgaggcgcagctgctacggtttcctgacgggctcaccattgcaggaggaatggtcggctggggatcatgggaccgatgtacggccatgcgttcctcaaccttccttgccacctcctcttgcatgttgagttcgtagctcgatacccggaactctaggtctgcaatcttcgcctcggtatctctcttgctcctcatccgactcctgtacgtgtggatgtcctccttgaaactaatcttccaaggaatcacccctttccctcgagttcgtcctggatgctctggagtctgcagggcgagtgtcagctcgtccctatctctgtctggtcggaacgtgccctgagaggaggcttccactgcatctgttagtcgtcgcgcagcctcttgtatctgatagccgaagaccagtgagccatcagctgggctgagcgttccaccgtgagcatagtaccagaacttcgatcgttccggccaattggctgttgccggttcgatacccctctcaatcaagctagcctccatctgctcccacttcggcatcgcgacgctatagcctcctgaccccaagtggtgatggtacttcttcttggcggcattttctttgtttctttccatcatcgcctgcccttgttcacctgtcttatatgcaacgaactcgtcccagtgatcccttagctttgggaatgtgtcgaagttcggtgtctgccccttcagtatatacttctggtacagatctcccttgaagctctgaaactgttctgccattttcttcagagtccaccttttcactttgtcctctgtacccgcaggaagggtgaatgtctcgagcattgtggtccacagcatctctttctccgaatctgggacaaagctctcatgatctccgcgtgcccttgttcttcgccagtacaccgtactgacaggcacgttatcccgcacaacccaaccgctgtgacgtacatagttcttggcggcttcggccggggcactaggacgtccatcttcttccacttccgttatgatgtgccgaccctcaagcttcttcgctgcacctcgttgcccgcgtgccctcttctgtccaacggagggttgactaccactagcctcctcctcctagttcccctccacatccctttccacgtgcccctgctggttcccctccgcatccctctccacgttcccttcctcgttcaagtactggtttggatcctcgttcccctcttcttcattccagtactggctgcttccctccgcgattgtatcgtacaatatctgttcctcatcgcggtcagccatctgttgatacaagaaacatctgctaagtcacgagacatttatgttttaacaatctaagtcatgtatgctaagtgtaaatgtcgtacattagaaccctacacaaccttacgtgctaagtctaattacaaatcgtgatataagctaagtctaggtgacgtatattatacaaccctagctagtaaataattatatactaagtctaattacaaataaaataatcttatattaaaactcaaataatattacatgctaagactaaaatagtcatgtatatgctaagtgtttcgtgcgtatatgctaagtctaattaagactacaatagtcaattgctacttgtcgcaccaattccgtagtcaataattacataccaagtctaattacaaataaagtaatattatattaaaactcaaataatattacatgctaagactaaaataataatgtatgctaagtgtttcgtgcgtatatgctaagtctaattaagactacaatagtcaattgctaggagttgcaccaattccgtagtcaataatgtcatactaagtctaatttgcaataaaataatcttatattaaaactcaaataatattagaacactacacaatcttatatgataagtctaattacaggtctaataatcttaattaattgcattacaaatataacaatcatttatattattacgtcacttgcctgctccaattccttctagggctagctcttccactcaggcttgacggacgactccgacaacacgtcttttctgcaagatacatatacatatatacatatatatatatacatatatatacatatacatacatatatatatacatatatatacatatacatatataaatacatatatatacatatatatatacatatatatacatatacatatatatatatatatacatatatatatatatatatacatatatatatatatatatacatatatatatatatatatacatatatatatatatatatacatatatatatatatatacatatatatatatatatacatatatatatatatatattgcatttcacgttaacgttcgtcctcgttcgttcgctcgttcacgttcgttcgctcgttctcattcacgttcgttcgcttgttctcattcacgttcgttccctcgttctcgcttgtcttcgttcgatcgttctcgttctcgctctcgttcgttcgatcgttctcgttctcgttcacgttgtcgcggcaacgtacgttgacgtgttcgttctcgctctcgttcgttcgatcgttctcgttctcgttcgttaacggcggtgtggcggcatcggggcggcggttggcgcggcggcgtggcgacggcggcggcggcgtggcgttgtggggccgtggcggcggcggcgtggcgtggcggcggtggcgtggcgtggcgtggcggcggcggcgtggcgtggcggcggcggcattgcgcgcgcggcggcgaaggcggcggcggcgtggcgacggcggcggcggcgtggcgttggcatgcggcggcggcgttgcgcggcgtcgaaggcggcggcgtggcgcgtcgtcgtcgtggcgcggcatctcgtggcgggcggcgcgacggagagagatcgagatcggagagatcgagatgcatgaagggagatctggcggcggcggctctcaccccagagatgcggcggcagcggaggaggcggaggcggcggcgaggacgacgagctcgagacgacggcgagatacggcggcgtcggcgcggggatttgccctaggcagtggcggcgaaggagagaggccgagagagatcgatcggccgaaaacgtttaagtgttggtgaagaagacgagggcgcaccgggaatatatatacccctggatctttactcccggttgttctcaacaaccgggagtaaatatcttttcccgctatttcaaaattctttttaaacccggttagggttaagaaccgggactaaagattatagcactgcatatgattttcgcttacatatgtgtttataaaatagaagttaatgcattaacattatttaaagtacaaagattaatgacaattacttcgaaaaattatttttggctgtaataaattaagtggataaatcgtaataagcaaatataattaataaaaattccaataatcatatatacttagcatatatatgaatgatattattatattggtaaaaactctaattaagatatgtatgtacatactgcatgatttaaaattaataaaaattgtaatcatcatatgtacttagcgtaggaattatattaaattaaatgctaaaaactctaattaacatatgtaaatgccacatgcatgattttaaccttttaaaagttcgaatagtcatatataagtagcatatgaaagatagtaaattaaattgtgaaaaactctgatatatgaatgatagttttaaaaatatattaaatttaatacttttaaaaattctccagtcaattataattagcatatgaatggtagtaaattaaatgttaaaaactctaattaacatatgaaattgccacttgcgtgatttaaaacttttaaaaatcctctagtcaattataattagcatatgaatgctagtaaattaaatgttaaaaactctaattaacatacatatgaaattgccacctgtgtgatttaaaacttttaaaaattgtaagtatcacatataactagcatatacatgatttaaacttgttgaaacctctaataatcgtgcgtaattaacatatgccatacatcaattgatttatatggataatcaatacatccaaaatagtttacatcgtgtacacaataattacggcacgtactttctcctcactattgttccctccttgtgatcgctgcgtgagtaaggggtgtcttcatttgataggaggatgctagggtcaatcgtcaccgtgaaagggggttgcccatccaactgatcgtaatcctcgtcagtcttgtcctcaactccgacgatttttcttttgcctgggagaaccacttgacgcttaggctcatcaggccctctgcccttctttcctttgctagacatgtccttcacgaaaaagacttgcgttacatcattggcaaggacaaaaggttcgtccgagtatccaaccttgttaaggtcaacagttgtcatcccactgtcatcaatcattacgcctccaccagtcaacctaacccataggcaccggaacagaggaaccttgagaggaccatagtcaagttcccatatgtcctcgatggcaccgtaatacgtggcagttgttccatcgtgtcccatggcatcgacacgaacagcgctgttttggttcgtgctcttcatgtcttgggctctcgtgtagaatgtgtacccattgatctcatatccctggaatgtcgcgatcgacccagacggtcccctcgccaggaaggcaagttgttggttgatcgactcgttacccatgagatgttgtcgtagccacgcggggaaagtaccaatgtgatgccgtgtaatccatgcatcggacttaccgatgttcctggcgcgaactagagccaagtgctcctcaatgtaaggagctaccaatgaagagtgttgcagaacagtgaaatgggctttacggaataaattgttgtctaccgtcgttattgctttccttccgagagttccctttccccgtagtctcccttcatggcgtgattcaggtaccccgattgggcgaaggtcttcgataaattctacgcaaaattcgatgacctcctctgttccataacccttggcgatgcttgcctctggacgagcacggttacgaacatacttcttcagaacgcccatgtacctctcgaaaggaaacatgttgtgtatgtacataggcccgagaatacggatctctttcacaaggtgacaaagcagatgcgtcattatattgaaaaatgaaggtggaaatatcaactcaaaactgacgagacattgcaccacttcattttgaagggcttctaatctatccggatcgatgaccttctgcgaaattgcgttcatgaatgcacatatctttgttattgttgcccggacattgtctggaaggataccccttattacaactggtagcagttgtgtcatcaacacgtgacagtcatgagactttaggtttgtgaacttcttctccttcgtgcttattattcgcttgatattcgtggagtatccagtcggtacctttatgctctccaagcattcaaacatactttccttctctgccttgctaagagtgtagctggctggactcaagtaatggcttcctttctcctttggttccgggtgaaggtcgccgcgttgttccatatgcttcagatcattacgtgcttccagtgtatctttcgactttccgtatacacctaggaagccaagaaggtttacgcaaaggttcttagtgaggtgcatcacgtcgattgcgtggcgtacgtccaagaattcccaatatggtaactcccaaaatatagagttctttttccacatcgccgcgtgaccatcttcgctctctatatgctggcttccagacccctttccgaacactactttaagatctttaaccatagcaaacactgttttcccgctgcgatgtttaggcttcgtacggtggtcggccttatgttcgaagtgcttgcctttcttccgtaccgggtggtttgctgcaaggaatcgacgatgacccatgtatacaaccttcctacagtgcttaagatacgtactttctgtttcatccatacagtgagtgcaagccttgtaccccttgttggactgtccggataggttgctaagtgcaggccaatcgttgatggttacgaacagcagcgctcgtaggttaaactcctcttgtttgtcctcgtcccacacggggacaccttccttcttccacaactgtttaagatctttgaccagtggtcttaggtacacgtcgatgtcgttaccaggttgcttggggccttgaataataatcggcatcattatgtacttcctcttcatgcatagccaggggggaggttgtagatacacatcgtaacgggccaagtgctatggccgctgctcatctctccaaaaggattcatgccatccgtactcaaaccaaaccgtatgtttcgtgcgtcctttccaaattctttaaattttctgtcgatgtttcgccactgcgaaccatcggcgggttgtctcagcatcccgtcctgttgacgctcttcagcgtgccatcgcaacattctagcattccccttgttcctgaacaaacgccttagccgtggtattatagggaaataccacatcaccttagcaggaattctcttctttgttagctgcccgtcaacttctcctggatcgtcccgtctaatcttgtatcgcagtgctttgcaaacagggcatgcttctaggttctcatactcctcaccgcgatataggatacaatcgttcggacatgcgtgaatcttatgaacttccagtcctaacgggcagactatcttcttagcctcgtacgttgtctcgggcaatttgtttccccccggaagaatgttcttgacgagtttcaataaatcgccaaatgccttgtcactaaccccattttttgccttccattgcaacaactccagagtggtatccaactttttgtgcccctgctcgcaacctgggtacaacgaagttctgtggtcctccaacatcttgtccaatttatgggcctccttttcactttcgcagtcctccctggcgtcctgcaacatctgaccaagatcatccgcaacgtcgttaccatcagcagctatttcctcctcgcctgtttgatttccttcaaatccaacatactgagcaaagtccggaatattgtcgtcttccacttcatcttcttccatttcaacaccttgctctccgtgggatgtccaacaattatagcttggcatgaaccccgactcaaacaagtggaaatgaatagtcctggatgcagaatactccttctgattcttatacttattgcatggacaacaaataaaacccctttgcctgttagcttcggccactctcaaaaaatagtgcacgccgtcaataaactctttggaccgccggtcagcgtacatccattgccgatccatctacatgagtcaaaaaaaccgcacacaaataattattcttacaataatgacagtcatacaataattataagatatctttattcatacaaaaatcataaaatattacaccaaataattcttaaaaactatttgtaaagttttaaactaattttaatgtgttttacttcttttaattttcattttagtttgttttctattatttaagattaactttcactagagttttccttctcaactattttataaaaccttgtttagcaaatgaactaaatttctatatattctttcttccccacacacattttctctctcatcaacttacaactaaattttggagacaaaaaaaagtgtgcaaaacataggtgtaaatgtagtatgacaaaaaaaacattggaggatgaagttacaaaccttttaggcacctccgatttgtatgtaatcaccaaaataaattcaatagaaattttggcatgacctcccctcttttttgaagtaattttgaagcttgctcgggcagctggaggaggaagaagacatatatataggggtgggactttagtcccggttggtagcaccaaccggggctaaagatcaccgggatcattagtcccggttggtattaccaaccgggactaaagttaagatctttagtcccggttggtaacaccgaccggggctaaagatcaccgggatctttagtcccggttgataatagttaagatctttagtcccggttggtgttaccaaccgggactaaagatcccgggggggcctgacaggtcctgacagcattcgaaccgggactaaagatgatctttagtcccggttggtaacacaaaccgggactaaagagcaaatatgcccgtttcccttttgaaccgggactaaagatcatctttagccccggtttttattgcatccgggactattgtggaaatcggccgaccgacgaaagatatatataggggtgggactttagtcccggttggtagcaccaaccggggctaaagatcaccgggatctttagccccggttggtaataccaaccgggactaaagttaagatctttagtcccggttggtgttaccaaccggaaataaagatcccgggggggcctgacaggtcctgacagcattcgaaccgggactaaagatgatctttagtcccggttggtaacacaaaccgggactaaagatcaaatatgcctgtttcccttttgaaccgggactaaagatcatctttagccccggtttttattgcacccgggactattgtggaaatcagccgaccgacgaaagatggtttctccaccagtgatgattagagcatcaccaacagtctacctatataattcccaaaactaattttgagggattttagtccaaaaattagctccaacagatcccctactctcctgcccgagttttggagttcccttcccccggttcctcgctccgtttatatgcgggcgcgaaagtcgctcccaatcacgcaatcccgcctctctccttcgttcccgtgcgtgggagatagcgatctttctgtgcgtgaaagaaaaaaaacggaattttctcttggtagtttaacagaagggcccacttttaagttttggggattgaatttaggctatctgttggagggaggagttttttcacttccatttttcagtttaggaaacccaaaaacaaatttttaggagaaaattatggataatatgttggtgatgctcttagtatgtattatgttccccacttaaaacaaaaaaaaatgcactataataccttagacctatattcctttttaagagcatcattccgtcaagggtttggaggcctatgtataaatgcatccgcccatcccatcgtcaggggaaaggtaatacaactgagaatctagaagctaatcccgaatattcacatctttcctggcttctctgcttatccccgattatctatgattcattgtcataataggttcaaattaagtgcaataaagacaaatttacccaacctaaaatgaaaataccggacaaatagttatccatagtaaaactttgataataaaagttggcgcaaattgcaagaatttactctatatcctacctatgttctaatttgttcagggggacatagataaacaaggatccatctttttttcacttgcccttttagcttgagatgttggcatttggcaacacttgggaagtatcaacttcttccaaatgatagtactagctcagatgcaattcggcataaaaggtttttttttatctgacatgtgggcccaagggcattttagaagtttcacgcaatttctctctcctctctaactagaaattattattttaatgggtgcggtgtccaccagcaaatatccaacttttacgagtgtcttttcccaaaagtcaattcgcgtggtgtcctacagctaaaaccgcgaactcacaatgtcctgtagtaaaatttgtcttacgttaaaagggagcactcctgcgtggtactcgtgtgttgtaagagtgtgtgtgtgtgtatatatatatatatatatatatatatatatatagtttaatagttgtgaaaataattctttttcatcgtgcgtgggtaccacaaccccaccggcatatattagtttggcagttcaaggcgtgattgagcataactaatgaagataatctaaatgacgctctatcaaacttcaacctttaccctttactcgtcctagctaagctacctgcacaagataatagataatgtagcacatctatcgatccaaaatgacatatacgatctttttcctgatatggtgcctctttacgcactggataggcagatagctacaacgaaaatgacataaagtggtgagtgcgcgaggggaaaagtgtttaattaatcaaggctgcaatgcattttcgttcgtggatcacacggctaggataactatttttacataatgtagttcatttatacagtcttaacgactctgtaaatgcgagtttcatgacagtctgaaccgcctataaaaataaatggtatgtcacattttgttttgtggaccatactacgtctgcgaaaatgaataacacgtcgcatttcatttgtggatcacaatactgtataataactactataatccaagctctccctctctctcacacatacacgaaatccaaacttgtagttcggtggagagaaagaagtgagaaagcaaggttcaaaataaatctcaaattaatacaagccaaaggcacaattgcacaaagacaagcaatagagccaacaaccctagtttgtgggtggaggggctatttatagccacaccctcagatttgcctgttggaggcaaagattttatttttgaaaatttctgaagtgttttcgtaaatatccgaaaatcatcagagaggaaaacaactttcggaactttctacggtactcttggagtttgctacagtactttttgaattttctctgaggttgctacagtggtttcggaattttcctaacagtgcaaattttcagcaagagcatagcaaaaaactgggcaaaataacatttaggaaattattatatatggtttcttaataggacaaccggtaaaattaccctatttcaaaaaaaaatgagagtttgtatcgaatatttgtgctctaaaaaaatctcaaatgaaaaactttctgctacaaagtggtaggtcttgtcgagaggtataatttcacataaagtttttcatcgtccgatttcacataaaaatcaccctattttcttaagaaaccgcttctaaaaaattatgacttttcacatgtggttccttaggagtcgcaaaccgtgcatagaaatatggctttcatgtgcaagtttgaatatgtgaaaaatcataatttttagaagcggtttcttaatttttcatatgcaagtttggctttcatatttttcacatataaattaaaaaaccgcaagtgtaaattaatttttgtcatataaattaagaaaccacatatttttcatatgcgattgttttaaggagtcgcaaaccatacgtagaaatatggcttttgaaaggctctacgattacaatatgtccttaaccaccttcacaggtggctgcaaatttgaaccgcctgtgaacaaaaaaaaaagtaaggcctgtaaaaacgcttttatacagtgtcactgatgaactagttagttttcttggccctcgatcattgcataccatttcaccgtttcactttcagtttggcggcaatctgccgctcttactcctactccctctgtacaatgcaagtggactcctggaatatcaaagaagaaatcagtagatatgagaaaagacccaaatgcctctcgtaatgtaaaagtagtaggaaaaattgatttatgccattgcaaatttactatattaaaatagtattattactattcacctattttgaaccatatcatttcacagttatttggtatatgccactacttattctttcaatatattttgtaaaaaaaattacccatcttccttcattctcctatattctgttcttctccagtgaagcaatgccggagccggatagatccaatgagatggtggcggctggcggcagtggagttgatcagatggctggtgacagatcgccgttgcagctagcggtgtacagctgctagcaactggttggatccagagagacggaagtagctagagagtagagacgttgctcccagcgaggtggagaggactaacagggtggagcagattgggcagcttgcggtagattcacggagagtgatcacgaaatagatacccccgcgtcgctctcgcgcgggcggctcggggggtgaaaaaccctagccgcccacgcctcccctcttccccccacctcgccgccgtcggagctcgccggcggcgaagccagcagcgagcggggatggcggctgcgaggcccttctcttcttggcgtcttcttccttggcactacgtggacgggacgaacgacgatgacccccaccacggtcggagttggcgatgtcgggccggtgcgaggaggcggcggatccagagtccctaagtcctgatccggccatcctcgcctgaatctcggcacgaggcagctaggggcggtggtggcggctcggcggcgttgtcgcaactcggcggtggtggcagcttggcggcggtggcatctcagcggcattgcgtggcggcggtgccggcctagatgcggaggcggatgcggtcatggtgcatggcggcggcgtgcggccgaaccgtgcggcggcggcagctcgggggcgtggcccgcccatgctggcggcggtgctggcgctggtcagcgccctaccacctcccccgccttcgccttcgctgccgctgagccctatggcacggctaggcctcgacgactgggcagtcgggctgccgcaggtgcccttagtggctaggtggagcggcacgatgcggctaggtggggcaaggaggccggacaaagggggcgccggcaggtggcgccggagccagagcgacagcgtttccagcgtcggcgcaggcctagatggtactgcaaagggagttggcggcggtggatcgtcttcctcattgtcggtcagcaccctcgcccttcctggagctcctccccttctttgtggggagtttctaggctggattgaggctgtcgacgtttgatgtctcgactacggtatttggacagtatggggatcgttggtgctaggatatatgcgagactgaggtaaaagagatggagacagggatttttatacaggttcgggtccctgagcggtcaggtaatagccctacatcctgttggccggagccgatgttgctttttattcaccataatcacaccagtacaatatgtggggtagcctatctaactgttgtcgatatggtggtctgaaggtctgactcatagtcgacaacagggtagccttcctcctcgaatccgtgtccggcgagatcagagatagcgctttcgtatctcctgacggtatccagagacaccgtaggggaatagccatgcctatccctaaagtcgatatccggcggagtgtcttggcgtatgtaggcttgtatgttgtggcttctggtgggcgtgtgttgatttcatgggtgtcttccatggtctcctctcttcttcccctcctagggggttttgtatttatacccataggtgtccccttgtacaagtagaactagggagaccaatatggatacaatccgagtagtccttgtcgtttccatgtagaactctggttgtctttccttatccggaactccctccatatccgcaggttgtttccgtataggacatggtatgtggtgggtcctgccgagatttagtcaactactattaggtatgtggtatccataaccatgacagaggcggcagcttgtcagcggggaaagctcaggctgctgaagcaatgctacccagtcccgggttctccttcagccagatctggcgaggaggtcggcgggtggttgaacggaggggtcctgggtcagctctcagggatggtggttcgatgaagtcagccgacggaggggcatcggtcgggtgtggcggaagccatgtaccgccgatgctcagatggtggattcggattaggtgacggaccacggcggtagaaggttccgagcgaaagcttagcccaatttttttgggccaacagtgacttcgcctccgggcgtggtaaccctcctgaggagtgttgaggtacccttcctccctcggcaaagagctctgagtgaaaaccttgtccaactttggacggatgacgacgacgtctttcggcgtcgcgaccttcgtgagggtgtcattttagagtcttcgtgtcgtggtggtgttgttggcccggtggcgattggtctcgcatagcgatgtccggttcggtgcttggcttccctctctgtagcgtgtgtttaggcgattggcacatggttcagggcgtgtgctctggtgcacatccttcctcaacagctagctgtcgatgtaaaatttttcttgtaaccttttcttccaatcttaattacgttgaatgacctccttcggtcattccggcaaaaaaaaagattcacggagagtgatatgacaaatttgtaatagcataaatcaaaatatatttgcaatgatatggatagtaatgaaatattttttaatatggtaaatttgtaaattgtaaaggtatgggttaaaatttatcattttagaagtatgatcgtttcgtaggtagcaaagtttcaagctctacttcctctcctcatgtcccgggctcctgaacggtgacctctaatttgtccgtctgtaccggagagcagccattatcgttgctacttcctctgttttacaatgtaagttatttatatatatgtctagattcattagtatcaatatgaatatgaaaaatagtaaaataatttatattgtgaaacggagtgactagtaattttctcaagtacagtggacgaacaatcaaccctcacagatcaaaccctcactagctcgttgtctcggcggcaacgacacacggaaatctgtagggtaacggacgatccaccggatgtcaaaaatgtccgactacgaaaacgaaagcacggatcaacagcaggcacgggcgagcagcggagccctgcatcgtacgcgtgcacagttgcatcgggtcggtatatatccacgtcgaagcgttcctgcctgctggctgctgtgctgctgcatgcacacgctaccataccagcggtatgggccggccatgtcatggccgctgtgccggccgccgtaccacgatgatgggttcagagttcagaccatgaatacgacgggcaatcgatcgctactagtgctcgaagcctcaggggatatgaccctacggagtagtaggcgactacagttatcactcagatccagggctggatgctgttggtaccgcgagttttggccgctgttcgcctagtatttgccaggtacgcactcgcgcggcacgcgctccgcgaggaccgacagcgactcgagctggcgcacagtgccacagcacgtctccgggccccagggcatagcgatcgaggggccggacagcgacggcggccggggattcgcggggccaaccgcgcgtcatgcgcgtccttgcgatcgggatcgatcgaacggtgctttgtccccgccactcaacggcctcggcggcatggccagggtcgaggacttgccctttagtgtacaccagtcattgcatgacaaagcttggaggcttatcgatcggcgagatggtcaaaaacctctattttaccgaaataacatattacggagagatttttaaaaattacatacaagttacactatagttacagtgtaattacatgcaagttacagtgtaattacattacgattatactgtaattacatttatcaaatttttgagagaaaatttgtcgacaaatatatagtaaaatcgtagccaattatgccggaaatttcctgtcatcctcccgtgatatgggccaaaatttaggccttcataaccaaggccgagggttgggctgtatgatagtgttctggtgtccacggagagtttctgagttgggctcttgattcttgacgtaagagggaaggactaagtccactataggcctctcaatttatcatcaagtctgaaattagtcctcataccgaaatacaagatacaatgcatctcgcaactctcaaaaccactgcaactaaggtccaaagtggtttgaacaacggtttcagctgatgtgacgcctacataaatggtttgatttaatccccgtcccacgtagcttagctgtggcattaaaatcaagatcaacaaattttaaaataaaaatgaaatatatggatccatatgccagtcaaataaaaacataaaaaatataatgcaacccacatgttgatggatcccatttcctccatctcgccccctctctcctctctatcttcttcatgtccacggtgttacatctcatcgcaaccctccctccctctccccctgtcgtcgcctccactcccccatgcctacctcctcaaggcccctccaccgccactgcctcgtgtcctgggggggaggagagaagcccacaagcctcgaccggctcccgctgccgtcggagcaacagcccgttgttcaccaccacgggttgcggagggaaccggggccctgctgctctcgcctccctctgcgtcggtatttagacagtagtcactgaggggcagcaccatgaggtgggcggcacgtttcgcggggcttgggctggggagccgtcacgctgctttcgagttcatcaaatagaaacagaaccaacattcacaatatttactttgaaattttcagggctttcttgaaggaaaagaagaggagatccaatggatttcttttttaatcaatttggagggagagacaatggcatggccggatcgagtggaggaggcggcatcagtctcgactgtgcaaaagagttccatctgcaggaggaagacgacgacggtagagcgatggggtccaagtggttagtgagatgggaaggagatagagaggagaaagaggtgaggtggaggaagtgggtcccactatattttttatgtttttatttgactgacatgtgggtccatatattcatttaatttattattgttttaaattttgattctaatgccacatccacaccacgtggaatgaggaccaagtcaaactatacatatagatgtcacgtcagctaaaattggtgtctgaactaccttaggatcgtatttgtagtagttttaagagttgagagatatgttgtatctggtatttcacttgacgaacgaattttagactcggttaaaaatggtgaagtaaacttattcccatgagggaactgcactctggatcttacattaagcccatatacttggtgggccaatgtccgtgcaattcttgtttgagagactgagatgtactagactactactccctccgtcctaaaaaaagacaaaccctggtttccgtgcccaacgtttgaccgtccgtcttattaaaaaattataaaaaaaaataaaaagacaagtcacgcataaaatattaatcatgttttatcatctaacaacaatgaaaatacgaattataaaaaaaaattatataagacagacagtcaaaattggatatggaaattcagggtttgtcttttttttgagacggagggagtagagtagtaggagtatatgttgttatacattaacttggtttagttcctctgatgattatatagcgtgtagatgctcaattcaaaaggcaaagagaacagattgcctgagaggctgagacggtcaagacctcataacttctcttaacccgaacacacggcagcaaatttgtcacgatcaagcacttaaatgaagccgttgattgtggggtctagaattcttattgtaccgtcggaaaattgacgcctgcacacccccaccccttcttccacgatactagcacgactgatccacatttccacaaagccgatctccacctttgtgagtcgtgaatacgtttgatcgagagtgtccactccatttcatgggcaaaaccgaagtgataacaccgcgtgcatttgttgccaccaacaaacagagggtgacggcatgattaggaaatcagagggtgggtgatggagaccacactaccacacaagtcaggtctccgaagccggctgtgttcgcatgcaccttttcccatcgcctctccttcgttttccgcgcgcacgcttttcaaactactaaacgatgtgttttttgtaaaaagtttctatacgaaagttgcttaaaaaaatcaaattaatccatttttgaaaaaaaaattagctaatacttaattaatcaagtgttaatggaccgctccgttttccgtgcacaggagttaggttcccatctcccccatccgaactcagccgaagcccgttccctttagttcttacaatcttaccaagtcataccaatcagttgatcgttgcagcaaggggtcgaagtgccacgatagtgaccggagtgtaacgaagtttacatcgtgttgcctagcagcaaagaagaaaaatatcgtcgaccccaccggccaccacggcgcacaggagtcaacagcgaagaccggggcgaccaaaatatgccacggatcgatcggaacgcgacgaacgcagacggggccccggggcgacgcacgcttgacgaatccatccgcagacgaaacagcgagctgcgctgacaccgtcgccggcgcggctcccccgcatatatcacgctagcgcacggagaggcgcaccgcaccaccgctcgtgttctaccagccaacccagactcgatccgcggccgcgcgcgcctatccgcagcgaagaggatgacgccgcggcggcggctggcgctgcccgcgctgctgctgtggtgcctgtgcgcgctcccggccccggcgcggtcacagagcgcggccacgcccgcgccggcgtccaacgaggggttcaactgcacggcgaacgccacgtacccgtgccaggcctacgcgctctaccgcgcgggcttcggcggggtgccgctcgagttagcggccatcggcgacctcttcgcggccagccgattcatggtcgcgcacgccaacaacctgtccacctcggccgtcctggccgcgaggcagccgctgctggtgccgctccagtgcgggtgcccctcccgctcgcccaacgcgtacgcgcccatgcagtaccagatcaacgccggcgacacctactggatcgtctccaccaccaagctgcagaacctgacgcagtaccaggccgtcgagcgggtgaaccccacgctggtgcccaccaacctcgacatcggccagatcgtcacgttccccatcttctgccagtgcccgaccgccgcggacaacgccaccgcgctcgtcacctacgtgatgcagccgggcgacacctacgcgtccatcgccacggcgttcgccgtcgacgcccagtcgctcgtctccctcaacgggcccgagcagggcacgcggaacctgagctccccggagattctggtgccgctccgcaggcaggtgcccgagtggctgccgccaatcgtgcgcgtgaacaacatctccacgacgcccgcgtccccgccgccgtccaatacgcctgccccaccgtcgtgagcaacaatcgagacggggtggtgaccgggctagccattggattgggcgtcgtcggtgggctgtggctgctgcagatgctgctgctgggctgcctgtggaggcggcttaaggcgagggggcggcgagcggaggcggtggcgagcggcgatggcggcgagggcggcaggtttaccaaggccgcgtccggtggcggcggcggcggcggcgggaggttcttggtcagtgacatatccgagtggctggacaagtacaaggtgttcaaggtggaggagttggagagtggcacgggtggtttcgacgacgagcacctcatccagggaagcgtgtacaaggcctacatcgacggtgaggtgttcgccgtgaagaagatgaagtgggacgcctgcgaagagctcaaaatcctgcaaaaggtacactctttttcttccataactgaattgttcgtttcagctcactcccaattcagaatgaactgtttctttttcctgtattttccctgaaaattggcttcggattgctaatttactgctaacagaacgaatcaataattgcttaggtgtcttgctgcttactagtactagctcaaatgagtccactgaaatcattggttctgagagagtgattgaattgtataaagaataattagtgctcgtattcgatgattagattaaacagaagtacgcacttctatacattccaacgcagtgagttgttcattggactagcggccgaggcactagagcaaatattttagagtcatgttggtgtctggatttccttttgttggtacatggataatttgttttggagtgacacactgacactgatgtaaaaagccttttagttgtgccaatttggactgtgcccagcagtagcgatgctaatggagttattaagaaattagtgttcgatctgtcactctgctagtagagacgtagagttaagaagttaagatttggatctgtcactcagctgctgccatcagatggtcagatgccttgagacgattcttaacggcctgctgatagcataatgagccttagaaaattaaaagggccgcccatgacccatctgcaaacgtaccggccatgtgataggcttcaatgtttaatctcaccatcgattgttatttgaatacgtttgaaccgtgggagatttgtagtgccgtgataattatgatgccgccaaagagtcacgttaggtgacgatgaagttcgggttgtcctctgatccactgggaaatttggaaaccttgtgccttctataccgtatcgtgtttgatccgtgtctctgttagtctctgccacgaacgcacgagcactgcatctcaccacgtacctaggtagctgcgtgcaccgccgaattgttcttcgcacggtgatgtacgagattggattttacgacgttttttcaacgaaggctgctgcatcgacagcatgaacattgactggctccttgactaccgactacagtacgctttgagatgggaccaggtccttgacctgcatcacatatgcacaaccaactcagggctagttgtggaagctttgaactaaactacaggataatgataggagtgacaaagtatgccaaattgccaattgtcaaatggcatttgcattttttttagtattatgtattttcctctctttttttttcttttgcaaaagaaccagttgtgtgcccatttgatctcagaaatcagaacctgtcagtactcagtaggttgtagcaaggtgggtgttgatgttggcaacattgtcgcaggtgaaccacagcaacctagtgaagctggagggcttctgcatcaactcggaaaccggcgactgctacctggtgtacgagtacgtggagaacggctcgctggacctgtggctcatggaccgcgaccgcgcgcggcggctggactggcgcgcgcgcctccacatcgccctcgacctcgcccacggcttgcagtacatccacgagcacacctggccgcgcgtggtgcacaaggacatcaagagcagcaacgtcctgctcgacgaccgcatgcgcgccaagatcgccaacttcggcctcgccaagaccggccacaacgccgtcaccacgcacatcgtcggcacgcaggggtacatcgcgccggagtacctcgccgacggcctcgtcaccaccaagatggacgtgttcgcctacggcgtcgtcctgctcgagctcgtgtcggggcgcgaggccgtcagcgacgacagcggcgagccgctgtgggccgacgcggacgagaggctgttccgcggccgggaggagaggctggaggcgcgggtcgcggcgtggatggaccccgcgctcgccgagcagacgtgcccgccgggcagcgtcgccagcgtggtgagcgtggcgaaggcttgcctgcaccgtgacccggcgaagcgccccagcatggtggacgtggcgtacacgctgtcgaaggcagacgagagcttcggcgactactcgggcgagagcgtgtccgtcgccagcagcggcgggatcgcagcgcggtgaggtgtcgcgggccaatcatccccagtgcccgtgtttgttagtggtagaacttgtactagtagtaaatagcgagtggcgatagagagcaggtagctaaataatctctgtcgttacgttacacgcgaggttgggattgtcaattagttttcgtggggagaagttggttgttacttgcaactcagttgtgcagaaactgcatatagaactatagaagcatcaagcatttctgtgtccgtcgggactcgggagtaccaaatgaaagtagcgatagatcaccaattggcggcttcacatacggcagctgagatgcgatcctccatccagcaatattacagacagattccaaaccttgccagtccacaatggcgctgagaatcaaaggccgaagggaaaagggagaagagataagtctatttagcctctctcatatcttgcctcggtcaagtcgtatctctcaaccgcaaaattgggtatgttgtctcctccaacttcagaaactggttcaaaaatagtcccaaagcagtattgaacccggtttgggcttacatgtcatccacataacgtattgactaggtcaggaaaagaattaaaaacaataatacccacatgtcagggaccctatcttcttccgtctgcctcctctcttctccatctctccacctctccactctcttccttgtgacctccaggccgaccggtgagagaggagcaaggcggcgtgtgggagaggagcaaggcagcgatggtatctcctatctatcgagcgtggaaggaggatcgagctaaatggatcatgtgtatggcatgcttggattgcagttgcccgctccattgccgtgcttcttcgcaacactatcgcctcctccacccctcccgtatccatcgacgacctcttcaccgccagatctagaatcacgctgactactctacccatggccaatgcgtcattgttctgggcggttggtaagtgcgaaggcggcgcagatccggttaagaggcggaggagcgaaggcggcggtgtagacttgagcgcgcgatagcgacggacaggaagaggagaggcggcggcaacacagacctgtagtgcatgacggcgacaaagagacggaagagaggaggcgctgaatcccgccctcctaaggtcgctagtgctggatctggcccccaatggccgtcgacgtcttctccgccacccccaatcttaccacagacgagtctattgtacggaacttcctgttgacagaaaacacgaggcctgggagatctgcttaactccagtgcaggttcaaagctcgccttcaaatgtatgagcgtgtcagttgatttgatcatgtaatcaacaagaaatagaagcaaaaaaacgcagttaaatctataaatgatagccgatcggctaggtgccgatgacatatcatttatctttgagccaatgtcatatatgcatcgatcagcagtcattaataaataaggagggactaaatctactcgatcggctacagatattaccaatatataatctttatatcgatatatacttaaatcaagtgattgtgatagatcggtcaccatgccgagacaatataaatcacttagatcaaaatatatattaataatgagactatatacgttcatagcatagccgatcagatagatctagcatgtatcggctaataatccgataccactctatattaagatattaaagcaagtagaatatactaaacaaaagcctaatatacttaaatgcagcaagatcttaacgtaaagggcagatttaacacgtcaatcaagtatataggataaaaagtagttaaatcaggtaagatcggctgaaactccgatactaccctaatcagcaaccaagaagcgggctagagattgagattctaatcacgactcataagatcaaacttaactgatgcagctataagtatgaaaagaaggacaatatctagacaatcaagccgttggatgtgtcatagagtggtagatatcctatataatctaagtcaacatcggtatttaacctaatcggctaccttatattgacggatgttagccgattgtaggttggatatcgatattgccaaggattgtgtaggatatatgataactcgatgaattacataaacaagattagagtgtcataaagatggaagcactaatcccgagaacgcaagccgccataacaagttttacctcttgttgaagatcgaaaccgatgcagctcaacccgaaagcaagaactcatcgaaataaaactaaagcaaaaaagggtggcgatgcgccgagtttgtattgaacctgtgtgttctaagttacatagggctcgggtctatttatacccgaaaattacaagatatgtccataacggacacgactactatctctaacaaactctaagataccataagtctttgcggcagacttttgccaaagcatatctctaatgaaattacctaaaacatcctaagtaatagatacaattgtcttctcaggactctatccatgtgcggcaatcaccttgaagcacctcaattcaacctgatgtcatacatcaagttgcattgttggaatcggctgcatcggcttacctagcccgactcagacccagccgatcctaatcgtagcttatctggactccagccgattcctgctctgtttccgaactcgatctccgcctccgactttgcttcgatctaatcttctttcccgatgccgatattaccaaatttggttgttaacacctccttactgtcggatgcaccgtccttgttccccccacggtcagatcacgtgcgcagcgtgcttgggctggctcgaccagcagccagtggctcactggcgttctccttcgactcggcggcatgctgacgacagagcacatgcactagctcgcgcttggcctggagcttagcagacaacacttcctgtgggtggtgagagagagagagagagagaagaggggggagggaaggggggacaagttgtgtaggaggaaaaaagtagtagtcacttacatgtgggctcatatatattttataatttcttctatgactaggatgccacgttagccaaacggaaatgctacataccggaatcccgtccggacgggacacttgttattcaaagaggagcgatacctcaccatgcatgtcccgagcagcagcagcctgtacaggacatggtgccgctccagcatgcacgcatggctgacatgggcggcggtgctacggcgcccatgcccgcaccgtcgacgcactaccccgcgcgcgaccgcgagctccttgccggcagctctggcgccggcgcaggggaggaggagcccagcgcggacgcaacggcagatgaggaagtagagcgcgaaggtgctgccctcgccgcgtcgttggcgtagagcacgacgagcacgtacttggctagctcgtcgaggcggcggaggaagtggtcgcccgcgacaagctccgacgtggcgtggacggtgcatgatgtgactgtcggcgacgagctccggcgtgggacgtggatgacgaaggacacgcccgtcggcgacaagctccgtcgtgggatgtggatgacgaaggacgcggccaccggtgacgagctccgtggcgtcgacggtggaggatgcggccgtcggcgacgagctccggcgtggggcgtggatgacggaggacgcggccgccggcgatgagctccgacgtggcgcggacggtggaggatgtggccgccggcaacgagctccggcgtgggacgtggacggtgggaccaccggcgacgatgctttagtgcccggctcctgatatctggtaggtattgtctgatacctcataagtattaccttctacgtgataagaatcgcatgatatctaatactccatccgtttcatattataagactttctagcattgcccacattcatctagatgttaatgaatctagacatctagatatggctagattcattaacaactagatgaatatggataatgctcgaaagtcttataatataaaacgaaggaagtaggtatcatttgatacctaacaagtatcacctgataccggttaggtatcaggacctaatacctcgtaagtatcaccctctacgtggtaaaaatcgcatgatacatgataggtaccatctgatacctcacaagtatcacctgatacgtggtagaatcgcatgatacctgataggtatcacccgataccggctaggtatcaggacctgatacatcgcaagcatcacccaccacgtaataagaatcgtatgatacctgataggtatcacccgataccggctaggtatcaggacctgatacatcgcaagcatcacccaccacgtggtaagaatcgcatgatacctcataggtatcatatgataccttgcaagtatcacctgatacgtggtagaatcgcatgatacctgataggtatcaggacctgatacatcgcaagcatcacccaccgcgtggtaagaatcgcatggtacctgatagatatcatttgatacatcacaagtatcacctgatacgtggtagaatcacatgatacctgataggtatcacccgataccggctaggtatcagaacctgatacatcgcaagcatcacccaccacatggtaagaattgcatgatgcctaataggtatcatctgatacctcgcaagtatcacctaatacgtggcagaaacgcatgatatcagttagatatcaggatttgataagcaccatgtatcgtttatcaagaccgatcccaccatgtatcaaatatgatacttggccatccgattatctggtacttgataccaaccgatatcacacacgatgcctgttatgaggcatggcacccactcggtatcagacatgtgtgatgcctgttatgaggcatggcacccactcggtatcagacgtgatacctgataatagacttgatgctcacccggtatcagatgtgatacctacctagtatcagatttgacacctggtagctaggtaggctactacttgctatactgaactagtttagctatcacatgaagattttttgcgtatgaacgtggacaaaatgacaaacgatagggtgacatgacgcaccttttgagacacgatgacagacatactaattgaatggaaggaatcgtccagctaaattgcttgcaggcctataccgtccgaacggtataccgatatatagcgccccctagccaaaacatccatcaaaaccgtcgagggagtcattttgcactggttttaatacttaatagaacaaatatatcccctttttcggttgagggatatgatttaacaaaggacaagagctaagggaggtagaatagacttaattcgtggcacactgctgcactagcccataaatggtaacttaaaaagtcctagacaggccaagcctttttcagttgagaattacgttaattgggccaccgtggacattttcaacgcaggggattgttgtcattttgttacattctgaagcgatccggcttataatcgtctatccaattctgtcaaggacgcaactaacaactttgcagtctattctcaacatccctcaagccataaccgtgtaattaaacagaacacaacatacaagcaggtatcagttaatcctcttgcaccaagtgacattccttatgcttgaactcgggtatcagagttcggtttgtactaatgcacatgttggcacgaactagagctggaggcatgcatgtagacatactattaaagtggtttactattaatctagtctattgcggagatgtacatgttttattttatagatagcaccttactttaccattgcgggtgctcttatgtctttaggctgtgtttgcaacccttcttcccaacccctccctctcgttttccgcgcgcacgcttttcaaactgttaaacggtgtgtttttttgaaaaaagtttctatataaaagttatttaaaaaaatcaaattaatccatttttttaaaaaaatagctaatacttaattaatcacacactaatagaccgcttcgttttctgtgcggagagtaaaagttgccatctggggcatgcgaggcattaagctatcactcaaattttcatccaaattttagtggcatcaagctatcactcaaattatcaaatactcctaataattaatcacaacacgcagaagacgaagacaagttgagtagtagtggtaggctagtagctgtaaaattgcgtacttggcctgcagagctgaagtgtgcctgaaaccatggcataatccgtccgagactcagaatcgacacaagatgagaactatttgcagctggaaggtgacgtctcaaggctgccatggacattattgcccacgggaggacgagcgttatcatctgcattctgcaggcttggcgtcacgccatcctgcatcaagccatgaactaaccacatgaacgactttacctcatgtaaaactcttgtcttgctactcgtatcaggccagagtgtcacactgtcagtttgtcaccaccccggggggcccgtgccaattgccatgcatgcatgccttgctatcaatcctgctgctgctgtacaagtgtgtgaactcgtggcgccatcgacagctcgatctcgttttcacgtacaatgactggcagggctcagtaggagtacttgctagtatagtgtaaaaagccgaaaaccaagattgaaagggatgaaatagtatcttggtaccacatgtttatgagaaattttgaaccatctagaattctagatttttcaacagtaccttggaaatatttttctatgaaaaaactttttaatagaactatccatatgcgtgattaaataagtacatcagcagcagaaatgttacctatcttctgtttaacatttggaatgagacgaagggaagtacaaaagagtagatgacgtatgttaccagcaagttgcaagaaaagtgaggactccgatcatactatggcttgtaatttcacactagcatgcacaaatgcatgtgcttaacatagtgagatgtcacgctcctcgctaaaaattgaaaaaagaaaggtaagatgtcacgcttccaaagaaacaataatccagtagcactagacacagccgctcctctcgtcacccgcgcatcagctcatcgacgtgtgccaataattcatgtatcaacaacaacagtagtactgttccattatctgagaaaacaaatcaactacaacactggcttgtgtgtctgtggctgtggactctgccgcatggtgcttgtgctaattgtgctgattccctcgacaaaacaggggaccaacagggagctgatctgttcttccagattctttcttggtgcttattagttcctcctccgtttcataatataagttattttaacatttcctatatttatattgatattaatgaatctagacattgacatcaatatatctagattcattgacatcaatattaatatgggaaatgctagaatgatttacattgtgaaacagagggagtagttccgtgaagaggttggtagtgctcgatcatggtagcctcgttttgccttggccaaaactaaagtatctctgcttgtgctgtctacttaattgatgttatcaagtgtccagcgactgatcaagcttttacttaattgatggttcattctgtacttaattagctactattcacttcgtagtacagcccaggctgcccatcgaattattactttataggcaagtcaccacaccgacgaactcactactactccttacaacaaggtcacaatccacgagattgtgtagaaaacaaaagtctgaaatatcgccaacaacaggcaaacataagccttcagagttcagagcagccggtgatagcacgccgtgctgagcaaagtcaaaatcgataagagctaaaaaacgctgcaaagctagctcttgaggcctggtttagtaccaaagttttttttcaaactttcaacttttttatcacatcaaaacttttatacacacaaatttctaactttttcatcacatcgtttcaattttaatcaaacttttaattttgacgtgaactaaacacaccctgagtcttgaatttcatgccacacacttgatatcacttaacagtacggccaatcctttaagcatgctcaccagagtcatcatacagtacaagtgtaccgtatttacaagggttccctatttacaatatcttgagctcctgtttggacgtgtttgattgcgcaggcaagcagtaccagtgtacgatagtcctaaaaaaatatagactttcgatagtaatatctcgagctcctgtttgacaagcgaaatgtatcgcattcaccggccggcgcggtggcgccacccggttctctcatctcatgtcacagccggagaccggagtgacgcgcacacgcgaaatgagacaatcctttcttccgtggggcgtatgacatgcaacagaggattttgtctctgcggatggacaggcgctgttgagtcgcgcatgccggccggccggccacacctcttgtactttgcgtccactgcttctgtgtgtgtgctgccttttcacgtcgtacagctgatgctaatggcaacagtgtacagtacaatactccgagtgtaagataaacgtgtgttttgattcttattctgtgataaacaattggtatatgtggttattggttttgatatttggaatttattcacgaagtggttttagagataattgattttcaggtgatgaacagggtttgttgtattgtcgggatcggtcagaccgggcggtggttgccggtcagaccggcgctatgtgagcggcggtcagaccggcttgccctcggtatgaccggccgacgctgtgtcggtttcgggttgtttctttggatatccgtgattgtttcatggctatgtcttctagatggatactatacatatgtaatactattgtttgctaacaatgagtcaagtaggtgatagcttggtctcagaatatggtttctttgtttgttttatgtgtaggtgactcgatgccttgggagagtatttgcggtgatggatcgggagtcggcttggtggtaagacgatgtccgtggtggtcagatatcatgcgcgatacttaggctagagttgatgcacgtggttggtgaagattccatatggcatacgatggaggtattatgtgcgtatgggatgcggagtcgaatttggaaggagtctaaatttggtacgattggttatgtaaagtttctttcttgtactagatggtttcctaaggtgtttaggactcatagtatgagtttggttcatggttttaggctgccaacctcatgtataaatagagggggagggtgaggcttcccggtatcgtttttgagagcaattgagttgctagtttagttagggttttgactttagtcgagatttttgtaaggagtgctgttggtgcactttgtaaacacagagagaagtaataaaggtatcatatactttgagagttcttcgatttgtgtttcatcgggtttcgacggtctaaccggcgactcaccggcggtcagaccggcgacgcaccggcggtcagaccggctagggcgcggcagttgatcaggcaatcagaccggtgttccaatctcggtcataccagtggcttccaagcggtcagaccagcgcatctacttcggtcagaccgagatccatcgatttcgagggtaacttttatttccgctaaaagtttaaatttttgcgtataccaaccattcacccccctctctggttggtttagttctcatgattcgattctacacggagttcttagtcttttgccaatgaaaccagcagaaagaagcgtacgggaaggcaggcccctaggcataaaaacatcgttctccaactggactgaattttaggttggttactggatgaatgtgaatggataggctgaatattctggaagctcgtttcacaccgagtttagcagttgaccattcccacatcacccaatgggggaatttgaagaaaataataatcttgtagtcttgtcctcgtgtggtggtgtggaactacgtttgcggcattaaaaaaaatctatgttggtgagtccacatctagtgtcacaaaataatatttcttggaagaggataagccgacctatataaaaaagtgttacggataaaacagaaaagataatggttaatgttgtaataggaggcaaaaaatcatcccatattcaaccgaaacagtttctcattcgccaaccaaataaacttttacttatggtaaatacttaatgcaaatacaaaatgaccggcgtctcgaaataagcattcaagcctacgacaagagaaaagcactattcaaccagggcggataaaatttgaaggttaagccatcaaatgagaaaaattccctcgaatataccgcggaaatcgctttaaccactattataagttggcactgaaagtttcagggaccaccaaatgtacaattgtactcttagaatttaggggtattgtagtaacttaggcagtgttctttgtcctgggttcccaacccctctccctcgttttccacacgcatgctttttaaattgctaaatggtactttttaaaaaaaaagtttctatgcgaaagttgcttacaaaattaaattaatcacgcgctaatggattgctctattttccgtgcagagaagatgggttcccaacccccattagcaaacacacccttcctgtgtattctttagggtaagattgtaacttcgtatatacattcgaggactatataagctgatcctaattttgcaatggcaaaataccataccacatattgaactttacgtttcgaggtcatcccattctcaggatacgcacaagaaataataccttttcgcctatatttgatatgtccgtggctgaaggtctcgacagtcaacaaatgaagaaatcctaatttctcagtccaaacacgaggcgtttcatcggagctaggcgacagagagagtacgtacacactcggtggcgaaatttccttacgactattatcccctgacgatttctgaagcaaagaagacctgaatggctgaatgtatacagtaacaatgcggttgagtacgctcgcgattgacatgattcgggagatacacactaccttggttttccatatgtttttgctccattcatactagaaacttgggctgtcgtcgttaggacatcaccaatatatatggtaaaagtggtctatagataggaccaatataaataaactttaactatggcaatcctcacaatatactccctccgttttttaatagatgacgccgttgactttttctcacatgtttgaccattcgttttattcaaaaaatttacgtaattataatttattttgttacgagttgttttatcactcatagtcctttaagtgtgatttatatcttatacatttacataaaatttttgaataagacgaatggtcaaacatgtgagaaaaagtcaacggcgtcatctattaaaaaacggaggtagtatatggatacaaggtagtattagaaaaagaaagaagtagatatagataatattatttatttcatataggtcgtccatatgcatataggtattttagttattttttttatatggactagttgtacaatgttactaggtggttgaatggaatagtttattttctatgaaacttttataatacaatgtggatacattgtggatgcaacacaactcattcctgccacgttggttggtttgcttttcagtacacctaccaggtagtacgtatcattcacccaacaaacctgacgcccgtattcggagtctcgtattaactctccgtgttctctctcgtggcgccggtggcacgtcaacgcatccaacaactaataataaccaccccccaagtcgtacgtcgtactcaccggccaccacaggagcacgctggtgctactacacacactgcttagctagtctggtcctcagctcgtctgcgtggaaatgcatacacacactgacacacacaacacatataagtagactactcctacccttcattctcttgtgcatgcgtggtgatgcaggattgcaaggtgcatcgagcaacttgcacgtttgcaccctgcccaagtcgacagattgtccttgcgaaatgcatcatgttccggcataggttaagccggcacggttccaaagtccccaccccacatgggggactcagcgtccatgcatgcatgcgcgctggctctagcagtctagctttagccggacgaggaagcgatatgaagcgggcaacctgcctagcggcatcagccgcatgcggaggctgttacacaagacgacgattcgttgccggattgccggcggcagttcatcgaagcggggcagtgtggttccttccgctgtctcgcgcagcggctctcactcatgacaacggcggcaggcaggatgatgatcttttcctcgtcacggcgcaattgaacgcgacccacactgcttcttcccttgcgtgtcatcagttcatcactcgacttacatcgctagatttttcgtatcagtgttcaaccttttttcgattttcatgctaatcttcttcccctactttcacttgcgaaagggagtactagtatttatgacggcccataccgcgggctgtaacacgatcgttgccactacacagctcaggtcgcatgccaccgccactcgctagtcgctgttttgtcacggctcacgtcacggatgggtcccttctctagcgccgacgtggcaggatagcattgatcccggaagacagtagaccaggcggccccatgcaacgaatttttcccagtgggaatagagaaacacactacagtactagtactacacatccaattactatagtttactattttctccacatactagtactccatatcagttctagcagtagtgcagtactttaaaagcgatcaagaaattacctgacgtagcaggctaatgacagctaaggtaaactgaggtgggtatgaacaggttcactactccttaccaaaggagaaaaacgctaaaaatagaagcttatcaatcgatttgatcacggcaataatgctgcatgcgggctcaccttgtggattaacgccaggcggatgcgacagtgacgacgcggcccatccacccgaccccgagccggccattgtcgagcttcacgtcgaacgccggcagcgcagggccgagccgagccctgacgcggccgccgatgtcctccccgatcgccacggcgcggaaccccgccatgccgaaccgggcgcgccacttgccgaacacctcgcaccgctccacccggtccgggccctcccggcccaccgcgttggccaccttgctcgccagggccgcctcggcccgggttctgtccgcgctgtcccggcccagggtcgcgtccagcgactccagcacggcgccgtagtgcgcgctcgcgtcggagaagcgcgccgccatcggcgccgtgttcgtgttcagctcctgctccaccagggtcacgacccgcgggcccagcgcgcgcacgcgccggagtagctcgtcgcgcgggttcgccggcgacacgctctcgtcgggcacgcgcgacagcgtgaaggcgaggttcacggccagcgcctctcccggctcgcaccctagcttggatgcctcgatctccggtgctcggcagctgactgccctgaagcggaagtctatcccggcttgctgcgcgagcttcttgagccgctcgcatgtggccgcgagcgattgtgtcatcgccggggtgaatggcgaggtgggatccgccacgacggtgaccttgagggaagtggcgggcacgcgccggtcggcgagggctttgatgagggcgacgtgctgcgcggcgctgacgtcgaagtcgacgaggtggatggcacggtggcccgccacggcgtcgaggatggcgaggttggctccgtggagtgcgaggccgaagcatggcgagacgtcttggaggagttggcacgccgcgcggtgctcaccgctgtagaggtccgcgagatgttgagacgggcctgtgccaacgcgggaggatagggcggccaccatcatcgccaccagcctctgctccgcgtcgccgcgcgggttagccgacagcttcagggcagacaggagagaggccgccgccgtgtggttgccatcggcgacggcagcggctgcctcggaaagaagctgccgcgacgaggccgcggagatcggcggcgagctggacgctgacgacgaagccgtggacgaagaggagttcgtcggggaccgcgccaatagcgcggtgctgttcacggcggtcggcaggggaagcgacggcgacgacgcggcggtgacggagttaagcctctggatcgtgtcgccccaatcggagcttgtgataccagagccgcaaccgctccctgccgcgtccgcctcctcgtcgtcgcccagcagctgcttctccagctcttgcaacaagaccagttcggtcgccgttgccggcctagcagcgggcgccctcgccaccgcttgattctgcgcggtcggaacggccatcatccgccgccgctgctgcatccctggcatcaccgtgcgcgacgcggtggtcaacgacgacatcgtcgacgacggctgctgctgcgagataccgccaaaaccagacgacaagccggaaatgccataggccggcgaggaggcggccccaccgagcacagcgccgatatccatgcgctgcctcaccgagcgcaggtacatggcctgctgcgccgccacctgccgctgctgctgccacctctccatctcccccaggctcctcttgagcacgcctccggtgacgcccgcgcctcccgcaccatcagatcgcggctgctgcgattgttgccgcgccgccgcctgcaacgccgccgatccaacaccgtagccgccgtaccctcggcgagggtcgcaccacggcgcacccgccgggtccatggcgagaggaaggccaagaccaaaaacaccacgagacacgagagacgcgagagcaaaggctcaatggaaacgagcgagacacagagaaaggagaaataaaaaggcctttggatggaacgaaccttaccgtggaggaatcctacctacagcggctataaaccgcttgcgccattcaatggcttccccctaataaaacgcctacctttttacggcccaccctgacgttaatatactccccgaataataaaaaagaaaggactgactcgtggatccacacccatacggcagcagtgacgctgacagtttggccccacgtccggtgaatcggtgcgtgggacctgagccttcgctgccgtggatgtggggcccactcctccgctccggtagtgcgcaaatagtacggagtaaatgagaggagagccgggagggcgatcgtgtactccatggcgaaaggtttggatgcgtgtgcaagtgtaaaatccgtaatgacgaggtgagaacttgcgtggtggtgtgattgttgtgtgaagggatgggaaaaaacgggagaggcagggcgcgccaacgcggtgcgtttccaagcgaagcgacgaccacacgatcgcgtgcggcgccgccggctgcgcacgatcgggacgaaacagccggcctagcgtgtttagctgggtgtttttgtggaaacagctcctgattccatggcatggttgaatccctgatttttctgacgagtcatgtggagtctgaatccgttggtgcggggactcgcggttgaagagagagaaacttctctacaactgtacttcacctgccgccacagattcgtacatgcttacgttttttgataccggggtatcttgcggagataaccaagtaaccaccacaactttttattagcggtaaacacatcgctagggtgtttactccagttcagaaccgccttgagggtcttttcatgtgttctcagttcgcagggacaactttactttaggaatctgtccacgttgctttgctccgcatgattacatagcttaaaaaaacctttgcaatttggcatatttcagggtgccaaggcgattgttggttgcctttcttgatcatattaaatgctactcccactttcatagttggggatactacaactacttgctcgcgcggccacgatccattcctcgggccacacgagaaatccatgtgacatccacgacagcgatggccctcgtatactagatgacgagcaggtagtacgtgatagaggacgactatactaaaaggtcattgcattgagtcagtgcacaacagcattctttcgtttaaattttgttcttttatctaagaaggcagtgtttatgaaggttgtttttatgtgaagatatttggagttagctaagaaactggtgggtaaagccggttcacccaactactagaacgttaccggctttctgcttacgcaccttttccatatcctaacacatattagtgagatctcatcttttctatatcctaacccatattttatggccttgtttagttccaatttttttcttcaaactttcaacttttccatcacatcaaaattttcatacacatataaacttccaacttttccgtcacaccatttcaatttcaatcaaacttccaattttaacgtgaactaaacacacaaaaagtgcctatgaaggttgttttggcagtgttttatgaaggttgtttttataatagaaccaatatatagtaccaaaaagtgcctcacaaaaatataatacgggtaatatccgtataattatccgggtaatacccggattatttaccggataatccgtatccgtcggatactacgttcccgaacctgatctcgtatccgccaaaaaagactcgtatttggacccgatatccatgaaaagtcccaggtacccgaattttcgaccggaatttgtcccgaaataatgtggtcaagcgggcgggcgggaaatacccaccccattttcactcctacacctgcataaccacgaccgactatttcttctgcgtgagtgcacattttaaggatatgcccactctaaggtcctatttgaaatgaattaaggattaccatatgaattttagaggatttaatttcctaggaaaatttcctaaaaacctttgttcatagggaagaataagaatatttttcatagtattacgttcttatggtttaattttatagataaaataagcaaagagatctaatctcttgataattttcctttattttgtctgtttaataaaagtttcgacttcgttcttttctgtgcttaacatttctatataattagacaaacatggcatttggatttctatcttttttatatcttacaattcaaaatatggcaggacataaacgacaggcaaacgacaatgaataagtcgggttgactattgaccagaaattagtaaattttatataactacatatacttggattaaattagcacaaaactacatatgtaagataggttatcataaaaataaaattagatgaaaaatttatcacgaacctacatgtttagtgccaattaaatcacaaaactataatgttcttaggtccaacataatggtagtgctagggatttaaattttagaataagtagttttgtgataactttaatattaaatctgtagtttagtgctattaagccttaatctatagttttgtcataaatttaccattgatctatagttttatgaaataatactttaaatctatagttttatgaaacaataccttaaatctatagttttacaattgtttagttaaaatgcctctaatttagtgaaatgtgctcataagaaaatggtcgtatgccactactaaaagtttggttagtccatatttaattgttaggggacccataactcatatataaattacacatgcaaggacaactattggaggcacaatttttatgctgctatatagaaaattcagaggaacattagtaagtagttagttgcttggaatatagaaaattggggtttcacgatttctaacttctagttttttaaaaaaattctattgctataaatttttagaatttggatgagaatccggattgtctgaggggagctgcaggcactataatctcctcaaacaagagcctaatcccctaccttaagagacacagaaagaggttaagagagatccatctattcactaggtgacagatatttcttatccactactacctctgttctataataattgacgttttagacaaggttaatgtcaaatttttataactttgactatcaataactttaaaaatatttagtttaaagaaactagaacaacatgtatagatttgtctttcaaagcactataataaaaataaacatgtatttatttattgtgtatattataataaaaaaataaggtcaaagatatattttgtagaccgtgtcattgtccaaaatgtcaataaaaatgaaaccggagggagtaatcactttttaaccactaaaccaacaataattagaagttcattatgtaaggagtaaatttcagaaaactgtaacttgagtgacagaactatcagtttactgcaacattagcgacatgtttcagtttgctgcaacaatagcgtaagaaattatcataaaaccgcaactttaacactatatgctgctacagttgtcacctgtatgtactgtagcagtatataacgtaaaagttgtagttttatgataatttcccacactattattgcagcaaactgaaacatgtcgctaatgttgtagtatactgatagttttatcactaaagttgtagtttttctaaaatttactcttatgtaagcataaataaatagttttcaaaaataaattctagagtatcatagtttagcctgagcacgtatgcatgggaagctaccctgttcgtttcatattataaatttttttataacttgtttaagcttgacaatatttatagaaaaatgtacctatgccttgaataccaaattagtttcgttaaatctagtcttgaacattttttattgtggtaaaaagtctttgggatttcatgtgagtgtagtgtggctctgcccccttcctgctgatcggagttgcatttagccgtcgtagtaaaattttctccttttccttgctgcaacttttgttttgtttttttctcccttccctggcataaaccggtcttgcttattacgttgtgtaacaaaaattctttttcttctaatatattgacgtgcaatctttttacgttcgcgaaaaatgtgttaaacagtccttttataaacttaattgaagttaaaagaagtttaattaaaaagagttagtcgaagtttattttagaggactgtcaaaccaatcacgtcctataattaaaacgtgctctctggtcaagtggtcccagtatttctcatacaatgattttcgtagcattaaataatatatcacatagattaaaacttgatatgtcaacctattagatgagaaaagagaataaagcaaggtagcaagatactactactaaacatgagttaaatagtactatctcaggcacataataattgtattttttatttaattttgtctcaaaataattatcacaatagtgtactaattatctcaacaatcacttatcattctaatttctttctctcactcagcaattcttatctatacaccatttggtctttcttctaaaatcttaatatatgctaaataattactctctcacttttatctatacacaatttaatgagggacatcattttttttttcttttaaaatcttattatatagtaaataatttagaattataactattttgggacaaatgtagtaatccacagtatgggataagtagtggtcctaattagcttgggaaacaatagttgcagaaaatccaacagacaaacatccgaacaaatccgaatgtttcgaacgaaattgcttccccaaggcaaccaacaaggcctcagccaactgccaacaagttcattgtagccaaaacaacattcgtgggcccatacttccctcctgggaacccacactcccggaagctttgccgagtactctctccggccaagaaaagaaaaaaaagataatatctgagaatgaatctggacaaatattttatctagatttatttctagaaattagttttttatggaacgaagggtgtagagcggtcaacactaccccactgtgccaccggcctggtcggtcccacctagtattagttcacattctccctgggacccacccggtgacaggccggctgcctggtcagggttgttatccgttggcctattattaatatgtactccatctattttatttttaaatcatttgattttctttataatcaataattttaagtttaactatatttataaaaatatagtaatatttttaatagaaaataaacatattatttatttaaggatatatttaatgaaactaatttgaggtcgaagatgttattaaatctttatataaacttggtcaaatctaaataagtttgaatgaaaaaaattcaaaacaacttataatattataatatggtgggagtatatgtgtatttagatattaaaaaattaatgcgagatgtaaattacgacgggagaagttataatcaactttaaatttaaaaatatttaatttttaaattctatcagtggattgtaaattataagacaaatggtgggagcatttactctagttgcacccgggtgttaggactattttggtttggtgtcaaatcttatcctacacgaaatagtacttgtttgattgggttgattttaaaacttgccaaacaatagaaatctccaccaatacattggtagcatcaaaacttgtttagctatcggaagaactatatatttaagatgtttttatcacaaaactatatagttagcgactaatttatcaaatgaagtattgaggcaaagtatcgtaaaattacacattttataaagaagtagaagttatcacaaaatcgaggaacttgccccatccatgttcggtcctaatgacttcatcgttctcctataggcgcttacccggtgtttttaacgatttcttgctttaaaaagggaccgtccacgggttactaaaatgctacatttcttccatgtgtatcatctaaatgatacgtatcgttcaaaatttctcatgtttattacaaaatttatttatacctttattatttttgcactcgagtggagctcccacgctaattagaaaaatctagttgttgattagatagttcgtattatcgtaattgtagatcatattgataactcacgttagatacaatatgcaattgtaaatattatgaactcttcagttttcctatatttaataattgtaaagtataataaatattaatccatatcactctagatttagtgttttattaatttatttctgaaaggaaaaagtaagaattacctccacaaactatcgcggtcgtccgaattacccccctgaacaacaaaaccgaacattctttacccccaactatgcaaaccggacgaattaccctcctcgacccaatccacggtggttttggtctacgtagcgtacgcgtggcagtccagtcagcattttatttaataaaaaacgtgggacccacctgtcatactttcttcccctctctctattctctctttcgcacagcgcgcacggcgaggacggggccacgggcggtgggcgcgggcggtcggcgaggacggcgcggggacgggtggtcggcgaggacggcgcggacagcgtggacgttggcgcggagacggagtcggaggtggtggaggagcgtggcggcggtgaggtgaggacgacagcggccggcgacggaggcggaggacgaccgggcgagcgggcaagcgctgtgggcggcgggctcctccttctcgtcgtaggagcgcaggggccgcggctcctcctccgagcctgttgatgtgaaaacacgaggcctgagagatctgcttaactccagtgcaggtccaaaagcttgcctttaagtgtgtgagcatgccagttgatttgatcctgcaatcaacaagaaataaaaacaaagagaacgcggttaaatccataaacgatagctgatcggctagttgccgatgacgtatcatttatctctgagccgatgtcatatgtgaatcgatcggcaatcatgaatgaacaagaaagaactaaatctacccgatcagctgtagatattaacgatatataatctttatgtcgatatatacttgaatcaagtgattgggatagatcggtcgccatgtcgagacagtataaatcacttatcgaaatatatattaacaacaagactatatatgttcatagcatagccgatcagatagatctagcatgtaccggctaatactccgatattactctatattaagatattaaagcaagtagaatatactaaacaaaagcctactatacttgaatgcaacaagatcttaatataaaaggcatacttaacatgtcaatcaagcatataaaataaaagtagttaaatcagataaaatcggctgaaaccccgatgctaccctaatcggcaaccaaaagcaggctagatattgagattctaatcacgacttataaggtcaaactcaactgatgcagctataagtatgaaaagaaggacaatatctagacaatcaagccgttggatgtttcatagagtggtggatattctatataatttaagtcaacattggtatttaacctaatcggctgccttatagcgacagatgttagccgactggaggttagataacaatattgccaaagattatatagaatatatgataactcgacgaattacataagcaagattagagtatcataaagatggaagcactaatcccgagaacgcaagccgccataacaagttttacctctagttgaagatcgaaaccaatgcagctctacccgaaagcaagaactcgtcgaaacaaaacaaaagtaaaaggatggcgatgcaccgagattgtattgaacgtgtgttgttgtattacatggggttcggggtctatttataaccgagattacaaaatatgtccatatcggacacgactcttatctctaacaaactctaagataccataagtctttgtggcagacttttgcccaaatatatctctaagaaaattacataaaatatcctaattaatagatacaattgccttctcaggactctatccatgcatggcaatcctcatgaagcacattaactcaacccgacaacgcgtaccacgtcatattgtcggtatcggcttgatcggctaaccttgtccaactcggactctgccgatcctggtctcagccgattcggactttagccgatccttgctatatttccggaacgatttccatcttgaattccgctttgatcttatcttcatctccgatactcagattaccaaatttggttgttaatagagccgtcgcgccgcgcctcgttccccgtctgtcgcacgttatcctcgtccaccggcgatgcgccgccgccagcacagcgaaccgggcccaagggcgggaggaagagcgcgacggatgtggacctcgttcgtgcaggcggcaaggcggagcagcctccccggcatcaacgtcgagccttgcttccgccgtatgccgccacctccggccttggctcctcgccgcgcttgcccgccgctcgctgccacctccgcccccgcctgtcgccagcctcacgcccacccgccacccgctgccttctccacccccgcctgtcgccggcctcgactcctcgaccgccacccgcccgtggtcgcctccgcacccaccagctgcctcatgtgtggctgtgtccagagagagggggggtaaaggaagagagagaggaagagtatgacatgtgggtcccccgctgctccgtgtcccccgctgctgccaacccacctgtgagagagagagagagataaaggaagagtgagacagattgagagagagaagagagaggaagagtatgacatgtgggtcccactttttttttttataaatagaatgctgactggactgccacgcgtacacacgtagataaaaaccaccgtggattgagccgaggagggtaattcgtccggtttacatagttggggtgaagaatgtccggtcttgtggttcagggggtaattcggacgaccgcgctagttcgggggtagttcgtacttttttcttttgtgatatagtaattagcaagttgtactagatttttttataatttaactgagtgttataaaaaaaacacctaacatatttacggcatgattaaaccttttaaagtacaaatatataagcctgtgcagcacatgggtgggcgaccgatgacatcctaattctcgtgattttctaatttccttgtgccgctcttaatttcaactctggtatactcaatttaacttgttcccctcaagttatttatttcgtgaaaaaaatacgacggattttttttctctcgctgtactgccccggtgcccgacggcggctgtatgtggaaaatgtcgctttgatcttgtgattggtgagttccattaggccttctaatttttttttcaaaacatcacatcaaatctttgacacatgcatagagcattaaatatagataaaataaaaaactaattgcacaatttgaatgaaaatcacaatacgaatcttttgagaccaattagttcatgattagtcataagtgctgcagtaaaccacatgtgctaatgatggattaattagacttaataaattcgtctcgtgattttcaggcgagctattaaattagttttttcattcgtgtccgaaaatttcatcagacatccaatcaaatgtctgatgtgacacctaaagattttcttttcgcgaactaaacaaacttagcatatttccactgttcatctattgttgatacttttgtttcgtttcggtgttcctctttttggttctgagaacaacgtccgcagcatcacacgtccacctgtgacctgtccacgggttgacgaaacagagcaaagaatctctcgcttcgctggcatgcaagtatgcgacctgtggcccgcgcgcgcgtggtacaagaccctcccaggtgtgcgatatcacgtggacaagtgctcgcttagacgctgaccccaacagctgaagaagtcagaagcaacgcgcagaggctcctccatgcgtttggctccctctcgttctgtcgagcggtgttaaccgggcgctgccaatggatctgatcgctccgcttacgtttgaggcggccaccggctaacccgaacgaagcggaagctagctcaggaacagcaagcagattacgaaattaaaacgagccgtgttgtacgtacggaggatggcgatggtagcaactagcaacggtgcgtaacctggcgtcgtggcgcgatgtgagcctgtcgctccatagctctccactcatgtatgccaacgcctccgagccggaaacgcacgttgatggcatccgtgatccgtccagtcgtccactcgcgagcgagcctttcagctacgtgtcacgttctccttctggcattcccgttccgagtatggccttatatacgggaacattttgcacatggtgaggaacaaaagaagggcacggagaaaagttcggataaagatataccatctcttgtaccttttcttttcggatttggatttgacatggaccgcagaccaaaacgaacatcgaaacgattacttcagatgttgcaatcgacatggaaacgaagtagagaccgacaggggtagaacgagaatcgaccatacatggaggcatttgaggagaaaaagagaaggtagcatcacgtactgcagccaaactgtcagctctcgcatctgcaagcggcacacggcagcaacagcacacaacgctagtaggccaaaagccttcaacgcgagccgcagccgacagatgatccaacggtggatggatagacgggccatcccgccggccgagaaagagaaggcccaatatagttattctcgtgcaacatactcaggatcggaataagttcacaataggtcctttaacctgagagcgagttcgattttaatccttaaaccacaataccagatacaacgggtacttcaactatcaaaaccaatgtaatataagtcccatgacggtttcagctgacatagcatctacgtgactaatttgactcgatcttcatctaacgtgacattgatgtggcacatgaagcgaaatttaacaatttaaaaaataaaacaaaatatgtgggtccacatgtcagtcaaataataagatttaaaaatagtgggacccacatatcagtagaccccacttcctccacctcatcctctcccttctctatctcctcccctcctccattcttcctcttcttcctcatatttagccggcacgactgtggtggttgtatgtggtggtcggcggtggctgttgtgtgggcgagcactgctcgccgccactgagcccgtgggcgtcacggtccgccggcaagcgtgcacataaagggaggagcgcggggaggacggcgagctgggcagcgtgtggacatgcaacggaacgtgtcgaggcaatactcattcgtcgtctcatggcgacgggtagtgctcacccacacaacagccaccggcggccatgaccaccaccaggcacaaccatgccgaccgaatctgggaaagaaaggggaagatgggagaaggagaatgggaggagaggagatagagaagagaaaggatgaggggaggaagtggggcccactgacatgtaggtcacattattttttaatcttattatttaattgccatgtgggcgcctatgttaaattttgcttcatttttaaatcgttaaattttgcttcatgtgccacgtcaatgtcacgtcagatgaaactgagtcaaattagccacgtaggcgttacgtcagctgaaaccgccatgagacctatattgcaccggttgtgatagttcagggacccgttgtatatagttatgtggatcaaggatgagaatcaaactcaatgtcaagttaagggagctaaagtgaacttgttccctcatgatgtgataacttcaaggccccgtcaaaagctggctcacattgatcgatgttgcgaggaaattgcagtaactggtctcctggcccaaacagtaaccatgccaattccggcaaagcacagcttttagtcgaaatagttctctcgattcaacgcatttccttccacgaactgtgcctccagcaaaagcaatcggttgtgtgatgtgtgacccaacgagcaatcaccgagctagcccagcgcacacatgaaactcgtcatggaacaccacagaaaaaaaacagtacgtgtgttcagtgatcgcattcatctacgaacagtgtcattattattgcgggatctgccgatctgaagttggcgactggcggggttgatggcttggcgttgatggcacgcgcccccggaaggatgaccaccctatatgtgttgtacgacatcacttgaccactgataattttttttaagcgaaccacagctcaatttgttttactcaattatagttattttttttaagttttagcaagtttataaaataaaattagtaacatttttaacacaaaacaaatataatgttaaaataaatttggtgctggattcaataaaactagtttggttttgtaggtgttattatttttctacacttagttaaacttaaattgatgattagaacaaaaccgaaaatgatttctggtgtggaacaaagggaatactgtgatgtgtggtaacctaattttgacaagccaactcaacactttagatggtatagtgcttttgaaaataattgggacatatatagggacagacttttcttagattttcctgcagaaaaggagattttcttagatttggattgatcccttgcaaagggataagatatgcatggctatgatgcgatggtagattaatctgacggctcttagtggcagctgtaggactaggatttagtggttaatggtaaactaacgaacttcaatttacatgtggttacaaattgtctctaattgagataagtaactagctaggtgacatgtaaggtaaattgttggtaatagcatttccagcagtctcctaatattccatctctataaacaggttattgggatgtcccaatactactataataagaaattttagcgatgtgcttttatagctccctaatatcatatccctaatattaatgggtcccatgtgacacacgcacacgagatagagagacctctgatagcatggtaagctttgagtggcggcggtcgtaagagctcaaggcggtagatgaactcgggtggagctctagggtagatttttggcaagtaccgagcagcacgcctgtcgtggacaatggtcatcgggggccgagcaacgcctccaggcgatcctcatggtgtcttcgatggccggctgagctagcgttggcggttaggtgtagcggaggatcaactatggtattgggggaattgcaactcccccttcattcggaaggagttggggtgattcattggtatatattttttggatatgggaaaatagaaaactgctggtgcacccacattttcaatatgaatatatatatatatatctggacatatatctgtacatgctgatacatagccagggtttgcctttttttgggatggagggagtgtatatataaaatatatatatgagatatctgggaagtgggaacggatgaatatgctcttactttaataaaaggttttttttttcttggtcatgggtcaaacctgcttcctctatttaccaaagagtttattttaagttttatgctacaaagtgtttatttggagtccacaaatttgtccacgaagagtttattattaacatttctccagtaataaatgagtggcacataagtcatttctccgaagtatcaaactgcctgagaatcacttaattaaaagaacttttcgtagtacgagggagtactaacaaatgggagaaaattgtataaagaacaagtactcaatcgttcactaggacaaggctaagctacaagtctacaacactacttcacgttgaaaattatctgtattcgtaaaatcttgttcgtgaaagaagggcaagaactgccgctgctctgggttcccggttttaagggttcagtactctgatatacatgacgagaccacctagcacaccttttgtaatctaaagcgcaaggaaatatataatatccttgcaaaaacaaaaagagaaaagatcaggatagctggagagcaataatgtactccctcccttttagattataagttatttttgactttggctaaattcaaattgctctaaggccctgtttagttccaaagtttttttttccaaatttctaactttccatcacattaaacctttaatacacacaacttttcagtcacatcgttccaatttcaaccaaacttccaaacttcagtgtgaactaaacacaacctaagtttgatcaagtttataaaagaaaaaatagtaacatttttaacccaagacaaacatataaagaaaatatattcagttatagatttaatgaaactaatttattgtaaatgttactatatttgtctacaaactttatcaaagttgaagttgtttgactttgaccaaattcaaaacgaattataatctgaaatggagagactagtatatagatcgaggcatgtatacggatatactatctacgtatcgctatccagtattctagtgccatgactttacctcaatcaaatcaagactttctttacggagtgtagctggtcggcatcgatctgcatagctagctaggagtacttaacacaaagggacctggtatgcgtatatatctacagcctatactgctatatacagtctatagaaagtcacagcctgaggagaatatatcacgtacacctgccatgttgcgcaaaacctgccctgaaaatgtgggatttggcccttcccgtcacatacgtacctcagctagccaaccagctggtacgtatgagtacatgcgctagctgccagtagagctagctgcatgaacatcttccactaccaaaagcaaggatgcttatgtccatgatgaccctgcaagtaagtcacctgtacgtgtaacacctatcctgaggtccatacgacgtactacctctgtcccataaaaaataaatttctaaagaattaaggacatactaggaggataggcaaatgactacaataaccttatttaataaatacaatacatgcacatattccatatataaacttgattaaaagaaatgttgagataatgggttagagatgggatagaaggaaggaagattacaagaaaatgtaattagtttactgggtcccatattagtagaaatacaatttttatggtacagaagttaaaaggtagaaattcaatttttatgagacggaggtggtatgtatatacgagacatacggataggacgaccaacttaaattgcctctggggctcaaggccagttcgatctacagattaaattgccccagcttgctagatcttgcatgtataatcgccgatcattttggatactttttatctgataacaccatcagacgatcgacgctgtgagatgtcactactacacccagcaaattaatggcaaccgatcgttgggcgatctctccctctctctctctctgcgatctagcctttcccagtttgtgcaacgatctaatgtctgatctctccttccctccgtggcgtagccaccacaaagcttttcttgctagcatggccggcaatggaaacgtacgactggagcatgctctccctgcgtttcgagaaggaatattgacactttcggggtggtgatcgaacctgtgccgtgggtcggtttgtgtatggtggcgtggcgtggctagccagccaagccggcccagtcagtggtggatgtgtgagtgatgcaggggagatctaagcgaaagatatgcgccgcattgatgccacaggggagggagggctacttgagtagttgagtgtttttcccgttctggcgctggagggaatcgtccgtcgcggccagccagatcgaacgcgctttaattcccttgcctatgtacatcaactgtactacgcgcggacgggcgcgcggcgcggcgcgggccggacgtgacaggagtcaggaggagactgaggcgccggcgcggcggggcggagctagtatagctaggttagcgcgcgggcgcgcggcgtacgatggatcggcgaggaaaacccggggtacgtacggcgcgttcgctcgctcgccggccgtctctcgctcgcgcgaggcgatgcgtaatgcgttgttgcaacccccccgcgcgtgcggggaccccgaggtgaatgcgcgccaacgacacagcgtgcatgcatagcatcctcgcactcgccagcgctctccccgtccatcgatccggagatgccggagctggccattgattgagggcgaggagagaggagagagacggacggatcggccggcgagcaaaggacaaggaggaaaccgacggcttcagtttgatggtttccagcgacatgaaggcgggccacaggacgggcgacacgtagctctctggctgcttgtcagtggctccttacctaggatgttcagtgtcttccataggataggtcatctcaggccagctctcccccccccccctctctccctctctctctctctctctcctctctgaaagagcctgttcgatcacatgcatgttctacaacaaagaatgaaaaagacctgcatacaacttgtaaatcactgaaaacctgagttgatgagtaccatatgagctatagtccaataaagtagagcttgcgaaaaatgcctatcattgtacacaagtaatataatagtggtttgcattttttgaattaatgtacctcgccattataaaaaaaagctacccggacaagaataattaaggacggagagtgaacttgttgagaattgagcgggacctacatctgggttaaaaccatacacacctacaactacacacttgaaagtgcatctcaaataatcaaaaataaagtgtgggcatgtcaaaaatcgaacataggtccacagggttaaaccatatatacatccccatcactacgctaacaatcagaataaaattttaatgaaaaatctcggtcacaagttcttttgctagggagaatgtacacgtataaaagttttcttaaaaatgttttaaaacactagttaaaaataattttaacttgacaagttcaatcttgttggtgcacactgtaacatgacgagagaatctcttatatgccactgaaaattggctatgtccttatatgtcattggaccaaatttgcgcactctcttatgccactctcgtctgttgtctgtgggttgactgttaactctcaagtaaaaaagacgtatttgcctttctgagtataggacatgcctaacaactcaagaagggcaaatgtgtcttttttactttagagttaacggtcaacacagtcaactgatggaagttgcatgatagggtgcgcaattttggaccaatggcatataggggatgaaccaattttcagtggtatataagggatcagactgattttcagtggtatataaaggattctatctaacatgatggtagctcgggtaatgttaataaatgttctaactacaagttagaatgttttaagttgtggattttccatggtttatctagtcgtgacattgcaaagtcttatatataatgggcatgctaacaaatcatcatatgttgtttcagttaactgattatagacgatatggatagttaatttggatatcatttgcagtgtaattcatttaaactttctctccggtgctgttgtaaaaaaaatgaattgtctggagagagatgataaaaaagaaattaacggaaagaaaatgaatattatttttatgagagatttaatgatccttgttgccaagagctataccgttctttctagcaaattttgctaaagtacatcatcattgtgtggttaattttagttagcacctcacaatatatttaacttttggagggagactttgagatgtagtaattgatttcatggtagagatcgccctccccattattttatatttttttgaatggatgagggcgcagaaggcacatgtgcaaatgaaaagacagaaatgcacctggggtatccagttcatcggggcggtgtcgtcccccaagtgatgagcacggtagcatacgcataccacgctccattgttggtaccacgctacccatatccccgtgtctaccgacttatcctcctagcttgaccaccaccctgatcgcattctcgtctctgccggtaggatctggcacagtggatcatagtgacagtgtgctcatggggctacttgaggaagccaacggctcccctgcaatgatgtgttgacgacctcggacgaccattgctgctagaggtggtgcgaactcttatccaactggtggagattgaaagaaggtggccattggccggcagaggatgtctggcctcctgttaattgcctccaccatgaccagtgggtggcttaaaggatgtcaaaggttgggacggtttctaggacgatggtgtgatgtgggaacacgaagaaaacatgaggaaaaaatattaaaatgaatttcccacttaaaatgcatcaaataaaaaaaataaagaaacgaccgggaatagacacaggatttgtgaactagctagggcaaacatcatatggtcccttgctgatgcacaagtacattgagatgtcatttcaattctgtgcatcatatgcatgtggtcccttgctgaatattactcttgaaatatctaccagtgccaatctattgcatgacttaattaattcacaggttttgttgattacattattagtaagcttgagagcacaagctcaatggatttttctataaatggggatcattttgcaattttctttgtcgtgcaaagttagccttctttattactacttctgtttttaaatatacgatcctattgacttttggtcatatatttaaccatgtatcttatttagatagtttgcgcaaatatatataccttcaatgataaaattagttacaatgaaacaaatgatatttacgcaattctttttactaaacaagtcacaagaagtacctgcagcaatatatgttggaaccgtgcagtagatcgagcctagctacgcaaaaaaacaaaaagagaaaaaaagggaaaggaaaaacattaatcatgcatgagcagtatgcccggcaactggaatttgtcaaagatatggggagaggagaataatacaagtactactactacctagctctaccatgcatatgcacccaaaggcaaactggattattggataaagcacagatgctggcaaaacaatccttaagcctcccctccctgcttctttatttttgggcagcctctaccggacggtgccgtggtccattggaccagtaggtggcgacatacatggtttgggttaagtctaggagagcagtgtgtgtgcgcgcgcaagagagagagactgtgagtctgggagtagccctctcccctcctttggccatcttcctcgtgtatatgcatatatgcatcatcgcaacggtgtatatttgtggtgtggcgggtgtggcattggattgcccccattttggctcgtgcttcccagttagggtaaaacctgtggtaaacttgctagccccacgccaaagttacccttctttattgttgaaagggagaggaggtgtgtgaattgtgatggagggagagagagagagatagaaagagagatgtgtgtcaaagcaagcaagaaaccagtttcacaaagagctactactagtactagtgtactactgtggtacagtgcccaatgtcctttctccggactcgactccactaatattctcctcttctcgcgcggctcgttatattctcgtcatcattggaggctttagcaagcaagaagagaggcagtggtggtggtggtggaggaggagctagctagcctgtgcttgctgatcggtgctgagctgaggaatcgttcgatcgatcgggcgagatggggaggggaagagttgagctgaagcgcatcgagaacaagatcaacaggcaggtcaccttctccaagcgccgcaacggcctcctcaagaaggcctacgagctgtccgttctctgcgacgccgaggtcgcgctcatcatcttctccagccgcggcaagctctacgagttcggcagcgccgggtataattaatacagacacaacaacacacacaaccaacaaaccagcatcaatttgaacctgcagatctgctgttttctctgatcaattgcttctttttttttgttcttttttgtttcttttatctgctgcaacggcgtcctgctcctctggggtttctcgttttctttttcatttatttttagcaggtgccaagtagccgagctactatacttacctggccatgttaattattttattccgtctgtctgtgtgtgtctgtgcatactactatagggacatggcgcggtgttcttataaaccgggaggccggatccctaactagcatgggaggatatcttttcagcggatctatacaaaccctactcctgctgacctctttcttccagtttctccgggtcttccttggattattattgcccatcttccgggttgtgcgtgtgtcagagacagctcgaacgataaatttctcaaaaccagtactagagagggtgtgttgtgtgtgagaactgagtggagagttagcatgaaggctgcaaactagaaaggaaggtatgttctttcctttttgatccatcaggggagccccttctggtattaagatctttccggcacattgattttcatactttgtgatgaccctggaagaatcggcgtagcagcgtagcaccgctccattttggtcttaccctcacctccccatgctatgaactgatcaatttcattgttcttcatcacccttctcctagctttccacttccttcggatctcatgccatgtttctcagcatgaatcaaatttaattcgtgttttctacttccatatatactggaagaaatttaattagatctatttttgctcgggaggtcttcatactttgagttctgatgccatcaccttatttcccccccccccttctcttgttctatcttcttcctcatcttggcttgatcattttgatctgtcagttatagcatgatgcattctcaatttgactgtatgtaagttcaaccggaaatatgttgaatggattttctatatatcaacacttgatgtcaggcctgcatctgtttcgcttgtggtggtgtggccaaaattgtctatatttgatctttgctcttctttctcctcatttcatgacgattcctactacggcttaaaccattctttattctttactaatcatggatgttgcttgactcctagttgtttcgtactagctcaacttggagatcttttcattatttgcctagttggtgggtacgtttgtgacagatctaaaatggtgcacgaaaagttttacttattatgaaaaaagggagcttaacagggtaatttctctatttattcgtgatgacattttttccttgataagggggattttttataatctgcactcacatgtttatatgtaaaatctagctcttttgttttgtttttggcatatttcccgctaagtatagagtttatgtggataacattataacttttcaagatccaatccacatctttgattgtgaaaatcatacaatagggaaaatcaactgaagggttaattagatgctatatgcatatatatatatatgtgcgcgcgcgcgcgcctgaatttaactatgtatgcatccaactgtttcattgaaaaagatttgatatttttcagtctattctttttcgagtatatatttaatatgtttcaatctgttttgaccattataagataaagcctatattcaccaggcatttgagatgatcttttcatgcatgaaaaagctgttgttatcacttcaactaaccagacgatctaacatgtatttgtataagaaacagaccttgatttccttctgtaaaatcatgcatgtgttcgttttgaattggagtcggcgcgcctgtgttttgaccgtcaggaaagtcttttttttccctgaatagtcaagggtctatacttcttgaagcaattgggacactaatcaattattgtttatacctcggaccatcttttccttcttcacaccactaatcagtttatgccttggaccattaattgtgttgttcacaagcttcttgtttatggtttacaaagcattcgcctagatttgtgtgtgtctctacacatcgatcacttttaaatacttgtcgctttcagttattcttttaacgtttggttatttatcttatttaaaaaaattatcgtattattatttattttgtttgtgatttactttattatcaaaagtatttcaaatatgacttatctttttttataagtgcactaatttttcaaataagatgaatggtcaaatgttacaagaaaaagttaaagcaaccactaatttagggcggaggtagtaaaacctagttattgtaaccaataattttatcaatctataaatgcaacacaaagtcacttcgtgatatctcacacaaagccacttcaacgatgaaagctgactgcatgttttatcaaaacacatgtgatcagtttgttggatgaaaaaaattatctatgtcataaatcaagagttataatataagcttctggctctacaagtaacatttctatgttttttttttacgttcttacatactatgttttgccaaaaaaaacatgatcattttgttggacgaaaagaaatagtaaatatagagtgacctttgatatcattataatataagcttctgcctctataaataacatctatgcactttttacgtcgtagtaatttgatatatgagaaatttacatataacatttttgtgcagcataacaaagactttagaaaggtaccaacattgttgctacaatgctcaagattccaacaatgcactttctgaaacccaggtatatatatctgcatgaactggtcatgaatttctgctgttggttttggtttcaaaatgggtcttgtttttttactatatatatttttgtatgaatatgcaattatcaatgtcctgacattgaaattagctacagtataaacctagctaggtattttcatcgtattgtgagattacattcaataaaaagtacacagattagcataactgtgttaatttgatgatgtatcccaaagctaatttgcagtgacttaaaatattttacttgacacagctactaaatcggatgttcttttcgtaaaagcattctaaagaatggcaaagtttagaagaattaaactagtagaatttcaacaccggcatgcattaaccatattttatgtaataaatgaagtttttattgacatgtcaaaggaggacaacaaagacaatcccttcttcctatatagttggtacccactacaagcattaacactataaagaagcatccaggttaagccacatcatcgataatcaatagccgtcggatcaaatgcatctttgtttgtttaactgtgcatgccttaagtaaggaaactgccatgggtaattaggcacatcaatggatgacccacttaagtgctcctggtcatgcattacatgcatcccccatattaagccactgctatatcccttaaccatctaccactcaaatgccaactttacactttattattttagaatgtttacttttgatatttcaattcttcaattctgtttgtaagcacatatttacaaagttgtttatcatcaccataaaatcccgtagcaacgcgcggggtatcaaactagttgtttgttataattataccatattacaatgcaagatcgtgctgtttacggcgtatatgtattcagaaatgttgcacctagtataggtttttaccagcatagaatatacaaatagctagtctaaatgactttttgtgcccctagctccctagtgtaaccttacatgaagtattccctgcatcgaatatgaagtatatattccctgcatcgacgaatatacaaatatactcctagctaggctaaaatacagccaccagtatgaagtaaattagtcgatgtagttcaatatttaaatatagatggtgattgaatgtacaacaatagtgcacatcccaaaaaaataagggtgtacctctgtgaccagatagtactccctcagtcagggtacgtccagattcattggactaggatatgtcacatccagtactagggccctgtttagattccaatttttttttcaaacttttaacttttccgtcacatcgaactttcctacatacaaacttccaacttttccgtcacatcgttccaatatcttcaaacttccaattttggcgtggaactaaacacagcctaggttggtttttcgtgggacggagggagtactctttatggtgattctaaatttcagtcaatcaattagagtacgtcctcataacatttcaaacaaaaacatagatgcccttgtgcataatttcaaaagtcatgagatcaaattgaaattcttgagaacttaccaaccgcaaaatatctaaggagttatgtcacttggttatatttatatcattgacatcctgcaacttatttgcccaataatcagtatatatagtttgctagctgtatcattaatagcatgtttcacaaaattttaaaaaaagaataagcccaacgtatatgtacaaggaggccatgtgacatatttagttaaaattcacaaacgacttttatcaagtgtttaaagaaaccgcagaaagttaatttgctctgtgtaacactaatattcagtgtatgattcgccaaacacacagttccttagtcgttagaactagctgataaatatttttgtgaactgaactaatggtttttcttttcctctgatcctgaagagttggtaccatgaaatgtcaaagttgaaagcaaaatttgaagctttgcagcgcactcaaaggtatttcactatgatctctccaagaagcataactcctgcaaatacacaatatatttttctataacatgcatgcaagtgataatgttgtgttaagggaaagagggaagaagcagcccataacgtgcatttacacacattattctgtaatatagctgctgcgaaactttatgtgtcatgcaatttaccttaatatttacattatgctctttgggttttgcttgattcttaaaggcacttgcttggggaggatcttggaccactcagcgtcaaagaattgcagcagctggagaaacagcttgaatgtgcactatcacaggcgagacagagaaaggtttatggcattctgcagtcctttgtttggaaccaaaatacttctgtttctagcctaccctggttcgcttgttatttgtccactgatttggatataggtgcaatacgtgagaagcaataaaatatacagtatgtctttagtttgtaggtaaagttatatatatttataaatagacaggaggtgtacgctagctatggaatatccccttgctaaagtttatataaagagcacctaactaatttgtttttgttcatggaagtgaacataataactgggaatgcttatcctacattatctaaagagaattgcataaaattgtttcaatctctagctaatgcatggtggtggtttggtagaaagccaagacatatttcacttagaatattgataccttattttatggtaaaggtcaactgatgatatttttaaagaagtgtgaaagctactatgcagcataagtaatccctttgtttcataaatttgccctaagtcattatctttaaccatcaatttctggaaatttgtgtagtttaacaaaatgtgaactgtacattctgtaaggatttttcatgttgtgtatctaacaacataacccttgtggtgttaaactatagtatcatttttttagaaactaatggtcaaaaatatatataagtgtttgaattaggacaaacgtagaatgacaagtaatttgaagcaactgggcgtagcatgtatcttgataaattcaccctattctaggcacgaaggtgatgcatacagtggcactaaatttcatataaaagactatctaagtatagaatagaaatatagaatggctagcacgcatgccctttttctttatatggatacatgtgtagtgacagggccgagcaactgcaacattaatctaaactgtcaatttcagatatactactacttatggctgcttgtttaggctaattaataattatatgtttactcttttcaaaataaaacacttcaaagctgcatgacaatcccgtcaacaaggatagtaatgacaatgagtagctgatgaaataatatggcttcaattctggagtttcaggaaaatttagctgctaaaaaaagaataagtgaataacccaaagaaaatagaactttgaaggatagaggtagagagattaaatatacactagtattcattttgtggtgcgtcgtacatgcttcaaaatctcccaaggaccataaaagatcccaagaaatagctaggtagaacacatgaaagttcagaaactggatataatctacacttcattatattactgtcaactcaatatgactgtgcttgaatggtttttgtgcagacgcaactgatgatggaacaagtggaggaacttcgcagaaaggtacattatcaatccaaagtttctcaagcatacatacagtatcagcattgccatgggcgggtgacttcaggagtgctagctactagtgataatctaaattaaaccacgaaatgacttggctagctttgacaatgcatctatattgccagcaaggctgctagggtataccgcatgcaagttaattagggtagatcgtgtagcctttgactgtataactaaagaaatggtagcttcgttcttgcgagagatttctttcatgagagttgttacatattatactatctccaatatatttttcttgtgccacaggagcgtcagctgggtgaaattaataggcaactcaagcacaaggttcttattcactcggaaatctgttatgccaatgcggtgcacatataattatttattgataattttcattcatatattctcatatccaatgctgcagctcgaggttgaaggttccaccagcaactacagagccatgcagcaagcctcctgggctcagggcgccgtggtggagaatggcgccgcatacgtgcagccgccgccacactccgcggccatggactctgaacccaccttgcaaattgggtaagattaatcaagaaaagccaagaccagaaatgcatatacttataacttctagctcaaatgcatacagctcgatcacagcatccgaactagtagaactaatgaaagattctcatcaaactgactgtgtatatcttgcttccattatattatctgaaaaacgattatgttactaggtatcctcatcaatttgtgcctgctgaagcaaacactattcagaggagcactgcccctgcaggtgcagagaacaacttcatgctgggatgggttctttgagctaagcagccatcgatcagctgtcagaagttggagctaataataaaagggatgtggagtgggctacatgtatctcggatctctctgcgagccacctaatggtcttgcgtggccctttaatctgtatgtttttgtgtgtaagctactgctagctgtttgcaccttctgcgtccgtggttgtgtttccgtgctacctttttatgttttgatttggatcttgtttgaaaataatcttaccagctttgggtaaactgtttattacgtactctatatagcatatgtgaccgacgacaacggtttcattttagatgatgtgtatggatgatttctttccaaaatcacatctttagtataagagcaattttaccatccaataccaaattttatactagaaaatattttgggatatcaaaatttatggtacctccagtaccaaatgttgaatggtaaactttcataatatacaagtcactctaggatatttaagacaatttttagttttttcttattgttgcccttgttaaatacatgagaaattttacatcacttaaaatgtatcaagaggtatcaaatttttttaatacaaaatttagtactttctccgtttatatatgaatgtggacaatgcttgaaagtcttataacctgaaactgaggtagtgtatcgagaagtacaaaattttacactaaaatcccagtacttactcaataactgtaaaattactctaaatatgtactccctctatttcagattataagttgttttaactttagtcaaagttaaactgtttcaagtttaaccaagtttgtagataaaagtagtaacatattcaacacaagacaaatatattataaaaacatattgaattatagatttaattaaattaatttggtattgcaagtattactaaatttgtttataaatttggtcgaatttaaaatagtttgactttaaccaaagtcaaaacaaattataatctaaaacaaaggtaatacattgtatcactctcatgaatggattgtaacatacattaatttaattactattttagttcttgtgcaaaagttgaaaacgatttatgtttggaatctttttgtggtgtatatatatgaaaccattcctctaccatccttccccaaccataatcctcacaaccgttagccccattgtgatctcacccagttgctagcctcttttgtcaccttgtcacagctctcctccattcattacacaatggcatcagccttctaatcctcgttgtgtagcaatctttcacatgcttgacacacatgaaggtatgatcagcatctaatttgttttatttttctgatttagtatcaccatccaatatgtgacttcaattcttggattttctattaatatttttttagagtaatcactttgacgattcatgaaattgtgaggcgcggttataatctagcacacaaatttgtaaaatatttatttttatatacaaactatatagtgcgtgtgaaccatagccaaaacaactcatggttacaagaaaatttgtgacgatatataacatatataacatattggacttttgatcgacatccccttttcaatgaaaccacaacatgtatgcaatgtttatctccagaacttcattccagctagtactgtttagttattgaataatgacaatgacatgacaatcagaagcatgaagatgatctcgtttttttcttgtaacggtatgggtgcaaactaattgtactattgaataaaggaatctgatcgaatttgccataacccaataattaatcaagtaggatgtcatgtgcactcatcaattgattggtacgtacatatgcattcaatattatacagaattttttccttcagtttctgtagattgctgaagctgtagcctttatctcacaagggaaggtggctcaacaggcacgcagggccatctgatcatggccgaaaatgattggtgttgctgatattgatgaatgtactttcgttcaaggtgagagaagaacgttggaagaatccagttaatggcgcaagtacatactagtagtagatttaattcaaactgctggtctagttaaatacgtactatattcatatttatttaggtgatattttatttaaacatataatagacgcaaatacaaaaacactcgtatacacttatatatttgtccttatgaacactcatgcacaccgtgcttctaactatgagtgtatatcataagaatgataaagttatcgtaggagcctcgttgttgacaagtacattgctaacaacttaaagaacaattaaccgtaaatacgaacaaccatatgtactaagtgtgatacttaaactcgatacacaggttcattataaaggaccttagcaggtaagctagactatttgctttttaaaggttaaatttgatgccaatgtgctttcaaggctgtgttcttttctcctgaagatgccccgtttgtttcttctgcaagggtaggataaaattttggattctcgtggcacgctttttaaactactaaacgatgtgttttgtgcgaaaactttctatatgaaagttgctctaaaatatcatattactccattttttaagtttgtaataattaaaactcaattaatcacacgttattaccacctcattttgcgtgaaacacttaatctttatcttcatcttcattttcaggagattcaaacaccacctaaggttaagttttttatgcaaaacgagatggtattaacgtatgattgattgagttttaattattacgaacttgaaaaatatattaatatgatattttagagcaactttcatatagaaaattttcgcacaaaacacatcgtttagtagtttaaaaaacgtgccacgaaaatcttaatttttcatccaactcttattaaagaaaagaacgggaccagtcaattcagtcagcttatcttgggccgtttgtttgtttacttcgaacacagtcaataattaaataacaaagtactaagaacgaggagggattaagatcatctagcttctctctaacgtggattactcattactgatatatggccgggttccttatgtagcgggtccacacgtcaacaattgaaaatcagagagaagtaattgagtcgcacttaatttaaaaaagttatactcgaaatttacaccgaaagttcagaaatatgagtgtagctgactcgaaatagatatatgccctgttccttccacatttagaactgtggaaggataaagaggcaaatttggaatattccacacattagttttgcaacgactagctaggagcttctgtataggacaaatgatcccagtcctacaaaatcataaagacattccagttgatacacaatcatgcatcatgatcaagtggatcaataaattatatatgcaaaatggaccagttcagctctcggttcagtgacgtactagtataaccataaaggttcaatttgcaaacattgaaaaacccaataccggaccagaaaaacagagacataccaaatgaaccgtttatcattataccactgtacacaggtgtattatctctatgacatgatttacttacatgcagtatctaatcatcgcagtaattacatgaacctcccaatgatcatgccaggtgccaggccgggccaaccaaccagctgcttgcctgcttctaattaattgttcctaccgtctaatcatcgatatattccaccgcattccgacacgtaccactctcctccagctggataatcctcggcagaaaaagaaaaaggaaacgaaagggaaagagagctttgtctccgttgattaacagcagcagtaagctagcttaggctgtgaaatggcgcgactgccctcccacccaaccgatcccgtgtcgcgtcgcggtcgcgcgggccaaatattgattcaccaaacgacgcccgtgaggcgggtggcgaggcggcccagtcgcccgcgcgggccggcggcggggcgcgcgcgcggcagcagggtggagcggcacagcgggcacgtcaaccggccgaggtcgatccaccggtcgatgcagccgcggtggaacgcgtgcgcgcagttgcccagccgccgcaccacgtcatccgcctccagcctctccaggcacacgatgcaccccgccaccgcctcgtcgtcgtcgcagccatgacagccgtgctccgaggccgcgagcagctgggcgaactcgaggggcgggaggcggtccttcacctcgtcgggcagcggggcgtcgacggcagccgggcggcccgatcgctccgggtggtggcagatcccgacgacgaagagcatcagctggagggcctccctgatggcggcgaggagcttggccaaggcgatgagcggcttggggatcgccatgcagtagcacaccagagggaaccccatgatcgccgctgtatcgagcttgctacgcacagttggcaatactactatacaccgagtcgccgaacgccgatggatgcacggaagcagagactgcggcgaaagagagtcgtggaaagcaaagggggaggatggtgacgagtgacgactagtcgttacgagcgcgcgcgcttatatagagcgccagcggtgatgggcgccggtcggcggtcgcggcctcgcgggcggtgtggtgaggtgatcgataccgagacgttttcacgtggtttttggtggataacgcgcgtgcggcgtgcggaaggaaccagaggcgcgcttgccgtacgttttaaccgcgtggcgtggcaagctgacgcgtaacgggacaacgtcgcgggttgttttgagttcgtttgagtttgaccggggtggtgcccccgccgccctggtacgtgcgcacggactacgggcgtgggggcacatgggaaacgcacgccgaaacttgatttgggcgagggcgagtgggcgtggggtccccggcgcggcaaagacggatgacgggctcgctggtcagacggaaaattcgtaggtgcttctactccatactgttgcttgtgttgtttactcctactaataatacacttgtacaacttgctatgcggttttcgacttttctcgcctcaccagagtacagcacggaagtggagtcatgttttgctttttttttccccgatgctcactgcgtgacggagtccaccaggcactagtggttcagagcgagactcaagggtactatacggagtaattcgcaaccgtatgtccatgttcaattcatacagttgacaggcgctatccgagatgaagacgatcgaagaacaagtcagcgcttgacggttgtaaaccacattggctagtcctagtgtggacgagagaggacacgtccgttagttgcattgatggagccactagcacatggatagagatggacggttgggattgggacacagatagcagtgacgaacttggtaacgttatggggaataggttttgcaatcaaactagtctagggcagattctgagttggaaagagcgaaatcgaactatgtaacattaaaaaaactattcaaaataatttcttgaatacaattttttttgaagaaaaagtaaatttcatataattacaaatatattaactaatctatcataataccatagatttaaaataatgtaccataaaactacaaatttaataccaaattcataataaaactataaatttattaacaaagttatcataaatccagatttagtatcaatttaataacaaaacttagatatttataactcaatgtaacattagtgctagaaactcaaactctaaattatgtaggttttgtgataattatattactaaatctttagatttgcaatagtttagttaaattatatgtagttttgagaaacttacttggaaaagaaaatgacaaaaatcaattttcaagtatggtcttttcaaaagctacccgccttactttaaatagggtaatgggagaggatgacaataactagagagaatcaaagccaataagattggagaacttaagtgatgattatatgttaaaggtggatgatagtgtaaccactctgcttctctagattgaggagatagcgaaattgatgatgggagaggggggaggggtatacggcctagatagatggataatctacttgaaaaggttgaaatgagttaggtgatggtgcgatggtactagagggattataagacgtagtcaatttttctgagcaattttgtattttatctccagatctaaagacgcgattgcatttcctacacattcattgctataatctgcatcgttatagttagcatgatccaaatacatgtcacaatgaaaattttttttcgctggtctttagagcaactagaaaattgtgcttttcttaaaatatgaatttaataatctattttttttacactaaatgtatttgttattggactactggttgatcaaaatctgtaaaatttacgttttaaaatcaggacgcaccacataaaaaaaatttcaaccgaggcagtatcgctctaaagccaacaacacggggactgatgtcaaaaacattataggcgctagtcgccatctgtgcccatttcgtcctgacgaaaaaagatttaggagaacaagaacttttgcaagtttttaaggagagcatcttggctttgtgggcgcctgggcaatcatggatcatggccgcctcatggttgtgctctcgcaaacccctcttctaaaccccagcggcacagtggcacacgacggtgcacgttgcaatcaattgcctttgcgtgtttacatgggaagggtgcacgaattcggtgagccatcctctctgtcgcgaagaggcatgtctaccggtggcacgcacggccgagcgcatgatttcggttcgctgagcggtctctttcgcggttaggcgagtgaattgacaccgagacacagcgatgtgcacggcagcacggggaatggggtagaatttgccgcggcagtaagagattggttcgagttggctgttgctgtcgggcaagatttgggtcgcgttacgcagctacgctcgagccgcagcgtgaccagcgtggctggaaaagggttctcgtagacgattggagttcgagaatcaatgcgaaaagcaaacggtgccgaatgtaccaagaatgggtcgacagccatttggccgaaccgctgaagggagatgcatgacaggggaggcggaacaaatgaacaaaaacgttcacggagcaggtatgatagtagtaacacgacactgtttgatggatgattcaatgagtgtggagattatggataccccatatctacatcacagttgtaatttagtcgaatatacggtaccaaatatagatggaatatctctacgaagactcgagtcagattctaaacttgtatgtcaaggaaatacccgggattttagtcggttatgattgtattttatctataatcccatattccgttacatcccggcctagggcttaataggattaatagaatactcatatcaacaagttgcaacttcttttccggaagccaatctccaaaaaaactccagggttaagcgtgcttggcccagagcaatttgggatgggtgaccgaccgggaaattcttcccgggtgcacacgagtgaggacaaagtgtgcagaaaagacatgtgttggtttgttggtttgtgagggcagtctatgacctatgaaagctatcaaatgtaagcgggcccggcctggggtaaggcagcatggcacatgcgctggcactggacacatgaacgtggccaagagaggacgttcctggcctagggttgatcgacggggcgtcgatctctcttaagggggtgagggtgtaacatcccggcctagggcttaataggatgggtggcccagagcaatttaggatgggtgaccgaccgggaaattcttcctaggtgcacacgagtgaggacaaagtgtgcagaaaagacggatgggtgaccgaccgggaaattcttcctaggtgcacacgagtgaggacaaagtgtgcagaaaagacatgtgttggtctgtgagggcagtctatgacttatgaaagctatcagatgtaagcgggcccggcctggggtaaggcgggacgttacagatatggactgtattttgtaaagcggactccttcccctatttaaggagggtccgtgtgcctcttggggggcgattctttttttccactttatacaatcaataacacactcggcggaatcatccccggacaggagtagggtattacttcttgaataagaaggcctgaacctgtataaaattccttgtctcaaaacccatccactttcctagcttgatagccacccccttttattattgtcgaaatcttgcttcgacagttggcgcgccaggtaggggcagcatcaagttctcgccgactaagtgcgatgggtttcgtttctggcatcgacgacttcgccttccctcccgggcaggcgttccggttcggcagcctcaacttcatcaccaacgacttcggcaagatctctctccttgactcggattcaaaccagtcggggatagaccaggtccccgtgccgttcggtattccgaactcggccgaggcctaccctaagatcatctctcccgagtcggcttcaaaccactcggacgagatccaatctactcttccgcgaccagatcaagacgacgagtcctatccctcaatcctgatgaaacttcctgatgatttggccgctgtcttcacagtcaagacatctcccactcgaagatctaggcgagctcaagcttcggccccgatccgatctagatccagggaggttggcgttatactccaacctctcgggacagtctcgacggaagagttggatggttacctcagctcccccggcatcagttctcgaccaaccgagatcctcgactacgacgattttggctaccactacgaccacggcgacctcgacaacttcgacgacaactatgaggataactacacgcccctcttcttcggcgtattcatggctgacaacgaaacggaggaacagcgccaagcccgagaagcggaccaagatcgcgcacggcaagaagctgaacgtcgccgactggaggaagagcgacagcgacaagagcgagaacgactacagcgtgagcaacaagatcgcgaacggattgcaaaggaggctgaagatcgacgacaatgcgccttggaatctaggcggcgagcgagagagctcattggacaacaagacgtcgatgggagagcggtctttcgcacccctagcagaacgcggttgcagcaatcactctcctcaagaccctcctcatggaagacgcactcaaccaagctgatcatgtagtcaacatcttgaaccagacgaagaccatgatcgctgcctcggttccggccaactccgcaagcacccgcaccccgactggtagccgagtccctcatcttcgatctcaagactatcaccagccaagcctcagcattgccggcgccgaatctagtcgcaggagcaggggacatgatgaacggtctgttcgctcgcctcccgagcgatatagggagcgccgagttgaacgaccacactccccacatcgaaggcgccccatcgatcttcgcgacaccatcaaccagcgcccgcagcaagaggccatcattcaccggatcgctacgacgacaacgtggacggagttgccgccttcacaagcgatctgcgtcgagtggattggccagccggctttaagccgactggaatcgagaaatatgacggcaccaccaaccctgagtcttggctcaccgtctatggtctcgcaatccgcgcagcaggaggagacagcaaagccatgacgaactatctacctgtggccctagcggattctgcccggtcatggcttcacgggctaccccgcggcacgatcggatcatgggcagagctacgcgaccacttcatcgccaacttccaaggcacttttgaacggcccggtacacacttcgatctctacaacatcgttcagaagtctggagaatctcttcgagattacattcgacgcttctccgagcaacgcaacaagatctccgacatcaccgacgacgtcatcatcgccgccttcactaaaggcattcgccacgaggacctagttggcaagttcggacacaaacctcccaagacggtcaaacagatgtttgaaaaagccaatgagtatgccaaagccgaagatgctatcacggcgtccaagcagtcgggcactacttggaaaccaaagaaggatacgccgaccgcaagagggagtggaagaaacaaccacaaggatcgcaagcgtaagcccgaagaacttgtggccacaacctctccatcttcccgacaacgttcccgcgtcaacaccttcgacaagataatgaactcccaatgtccgcatcatcccaactccaaccacgtggccaaagattgcttcgtctacaaacagtttgcggagcaatacgtcaagaacgcacgtaagccctcagacggagatcaaggcacatcaaagaagaaagatgatgaagacgatgccctgaccggttttcaagatcatcacaaagaacttaatcacatcttcggcggacccctagcttatgagtctaagagaaagcagaagctaacggaacgggagatcaatgcggttcagcctaacacgccccaatacctttagtggtcagagatagcaattaagttcgaccgctcggatcatcccgaccgagtggtccacccggggcggtatcccctggtactagacccagtggttcgcaatgtcaagctccaacgaactctcatcgatagtggcagcgcactcaacatccttttcgctaagaccctggataatatgtagattcctcacacggaattaaagccgagtaatgcacccttccatggtgttatcccaggattgtcagctacaccactcggtcagatcactcttccagttaccttcggcactcgggagaattttcgcacagaaaatgtttgtttcaaagttgctgatttcgagacagcatatcgtgctatacacggacgaccggctctagccaaattcatggccgtcccacactacacctacatgatgatgaagatgcctggtcctcgaggggtcatatcactacggagcgacatcaagcaagccgtcacatgtgacaaagaaagttgcgagatggcccaaacccacgagaccactctcgcccgcgaagagatccgactggctgcgaccacggcaagcgagggagaagtgcctgcaaccaagctgacgaagaccgaagaaagtgatgccaagacgaaaaagattcccttagatccctccgatcctgacaagactgctgtaataggcgctgagtaagattgtaaataggaaagcgcgctcatcacctttcttcagaataataaagatatttttgcgtggaaaccatccgatatgcctggtattcccaaagaggtgattgagcactctttacatgttaaggaagacgccaaacccatcaagcaacgactccgccgttttgcacaggacaggaaggatgcgatcaaggaggaattaaccaagctgttagcagcaggcttcattaaagaagtccttcatcccgattggctagctaacccagtcctggttcggaaaaagacggggcaatggcgcatgtgtgtcgattataccgacctcaacaaatcttgtcccaaagacccttttgggttacctcgcattgaccaggtggttgactcaacggccggctgcgagttactcagcttcttggactattactcgggatatcatcagatccgactaaaataatccgaccgcttgaagacctcatttattacgccctttggggcctactgctacatcactatgccctttggattgaagaatgcaggagcaacctatcaatgcatgattcaaagatgtttttcaactcagatcggtcgcaatgttgaagcttatgttgatgatgtagtcgtcaagaccaagcagaaggatgacctgattgcggatttagaagaaacttttagaagcattcgtgctttcaagatgaaactaaacccggaaaagtgcatcttcggagtaccgtcagggaagttgctcggatttatggtatctcaaagaggcatacaggccaacccagagaaaatcaacgccatcctcaatatgaaaccgccaagctccgaaaaagacgtccaaaagctgactggttccatggctgcgctcagccggttcgtctcacgactcggcgaacgggggatgcccttcttcaagctgctgaagaagactgacaatttccagtggggacccgaagcacagaaagcctttgaagacttcaagaaacttctcaccactccaccagttttggcctcgccacatccgcaagagccgctactattatatgtgtcggcgacctcccaggttgtgagtacggtcctggttgtcgagcgtgaagaggaaggccatattcaaaatgtccaacgtccaatttatttcgttagcgaggtcttagtcgactccaagacaagatatcctcaggttcaaaagttactatatggtgtcttaattaccgtcaggaaattatctcactactttcaaagtcactcggtcacggtggtcacatcgtttccactcggagatatacttcataatcgtgaagcaaatggacggattgcgaagtgggccttagagttgatgtctttggacatatcgttcaagccacgaacttcgatcaagtcacaagcgttagctgatttccttaccgagtggaccgagtgccaagaagacatgccagaggaaaagatggaacattggactatgcattttgatgggtcgaagaggcttacaggaactggagctggggtcgtcttgatttccccgactggagaaagattgagctacgtattgtggatacatttttctgcgtcccataacgtggcggaatacgaggcgctactccatggattaaggatcgcaatctctctaggcattcgccgactaatcgttcgtggagactctcagttggttgttaatcaggtcatgaaagagtggtcttgtctagatgataatatgactgcttatcgacaagaggtacgcaggttggaagataaattcgatggactcgagctcacccatgtcctacgacataacaatgaggcagccgacaggctggccaattttggttcaaaacgggaagcagctccttcagatgtgttcgtcgaacatctttttgaaccaactgtgcccagaaaagaaacacttgaagccatggatactcaaggcgtaagcatgattgaaaccgactggagagaacctctcataaaattttttaccaaacaagaactccctcaagacaaaaatgaagccgagatgatttccaggtgcagcagactttacgttattcataagactgagttgtacaagaaaagtccatcaggaatactgcagcgctgcgtatctttggaagaagggagacaattgttgaaggatatacattctggtatttgtggtaatcatgctgctgcacggactattgtcggcaaagcttaccggcaaggttttttctggcctacagctgtgtctgatgctgacaagattgtgcggacatgcgaaggttgtcaattttttgcctgacaaactcatctgccagcccaagagttgcaaaccatcccgttgtcctggccgtttgcggtctgggggcttgacatggtcggcccgtttaaaagggcagtcggcggttacacgcatctctttgtggctatcgacaaattctacaagtggattgaggctaaacaggtcatcacgatcacagcagataaagctagagattttttcatcaacattgtgcatcagtttggggtacctaatcggatcatcactgataatggcactcaattcactggtggagcatttagatacttttgtgaagattttggcattaaaatttgttacgcctccgtggcacaccccatgagtaacggacaagtcgagtgcgctaacggcatgatacttcaagggatcaaagcacgcgtttttgaccgactacgtccctatgctggcaagtgggtagatcagctgccgtccgtactttggtctttacgcactactcccagtcgggctaccggccagtcgccgttctttttggtttatggtgcggaagcaatgttgccgagtgaagtggaatttgaatcactacgatttcggaacttcaacgaggagggctatgaagagggccgagtagatgacatcaatcgactagaagaagcccgagaagcagctttaattcagtcgactcgatatttgcaagggttgcgccgttatcataatcggaatgttcgatcgcgagcctttttagtcggcgacctggttctgaggaaaattcaaacaacacaggatcggcataaattatctcctttatgggaaggaccgttcataattgctgaagtcactcagccaggttcttatcgactcaagcgcgaagacggtactctcatcaacaattcttggaatattgaacaccttcgtcgattttatgcttaggcatttcgtttgtatctttcctctttgactgctaacttcaagtttttccttgaagttttcagtcagggggctactatgataataatggagtgtgatttttatcaattcaatttgcttacttgatttatcattgccctgtttggtctttcgacttaaccaatgaggactgaaggtttttaatagcttttgcgggttttaggctcaataaggcttgacaaaggcctttaagaaatcagaagctaagtatggaacaccaagcatagcataaattcatcagtattgtacaaattgagcctccactgtcattgatcatcaaaatcattgttatatcaatcagtatcagttttttcatcattagacttatcagacccagtcggccgaaggtcgacatcttggaatctctcaactacatcagcagcaatcttgtcagccgctttctgcgcatcactgatgaggtcgagagcagcttcttcgctcgtcccatctgcaaagccatcaatggcatcaatgtcaactcttggataaagggatttggtcatcgccaacgccagactcgctcccatacttccagcttctttgatgttcttgaagtaagtatctggagcgactctcagcttgtcgaagatttcggcagcatcaagtgtactcgaaccagcgttattgaagaacatggcctggataagtggagtagcggcattagcgactttatccctggctccttcaagcttgttgatattgtcaactaagacatcaaattgtgcttgagacttgatcttgcggtccgcgtcgacagattcacattaatgaatcagcatatagaagataatggcttttgaggtattgattattgttaccttcaacctcctttaaagtcgaatccctctgtcttgccagctctgccttgtcattttccagagtttggatctgcttctctagttgagatatcttggcagcttgcactacattaacttcggttaatcaagattacagagataacaacacaaatcagttgggcagagtttgcgcgaaccttttgatgagccactcagttcgaaattggactcctggagctcagcaatccgatccctcagatcgtgttcattcttcttggcaagttctctggcctcgtgcagttgactcctggtggctttgagggttccaagatgaggaactagtctctctagggttgcggtttttgcctcgttcctaagatgaatcctctgcggagcagtttaatcagcgctcgagccagacggtaaacaagatggctaaggtcaggcgtcaaggaacttacatttacaatgcgagtcgcttggttgagttcctttttcagtaggcatacctcttcgtcttctttttgccggtttattacaattccttgaggttgcaagttgtcatcccaccacttgaccagaataggagggcacgaatcttcggctgcttgtatacggggaatttcttcttcatcaccgatcattggtcctaatgcatccattgacaaaggttagacaatcgatcagagttatttgggtcaacatggtttcgggcaaagtgtttacctgtaatgatttctggacgaggacaagtggattcggatgcctttaaaggggatccagatctccggtcattgctggcgtcttgtccgcgagggttgtctgcttgggtttcgacttctggaatctcttggcttggccctgcgtccgactggtttccaatcgggggctcctgattaactccggcttcggcttcggccgactggatcccagtcgggggttgatcaccggattctaaattatcggttgccggttgattgtcactcggatgatcctcagtagttgactcggtttctttggaagaacttgtgtccacgttagtcgggtcagagtccttcccagacggatctatatcagatggtttcctgcaaatttgattatcagtattattgccgcaatgggtgcgcatcaatgcaagagagatcgttatatgagttgcacctagaagacttcctgatctttggcacagggcgactggatgttttcttccttggagtagcctgttttgttagtttcttggttgtctctcggtctccaggcctcctggcggtatcatcggcttcgtcgtcacttagaaccagcttcctctttcgagaatctgactggctgattggatcagaagcacttggttgagtttcagaccgaattcttggtcctccgctcccttgcccagtttggtggcggggcgatcggtgttgggagatccgacttcatcaaagcaaattcctgggtgtaatatccttcattgttaactgattcaacaagaaaacaagatcatattttgagaaaggttgaagtgtatgaatacgtaccggtggaggaggattgaatgcattgaacggtacgactggcagcaagtgtgagtagctgacaacgatggtgtttgagaagatcttatacatcctttccttcatgaccttgaagtcaagagaatctggatcttcacggtttgggtcatgcttgccgtcaaattcgaaggctgtgcgagatctttctttgattagagctaaccgacacttgataaagtgccgggtgatctgttctccttgaaggccctgttctttcagctttatcatcctctccatcagttctactgcttgtgcagcttcatctcccattggcagtgagttccaagtatcccgataaactggaggaagacaggagtactcgggaagaacaggctcggggttttgaacataaaaccaatttgcgtgccaacctttatttgaggtcttgaagggcatggagaagtatttttggcttattgttcccctgagttggaaaccagcacccccaacgacgcatggtttactcttatttggctggggcttgaggaagaagatgcggcggaacaaggcgaaatgaggcctaatgcccagaaaagcttcgcaggcatgaataaaattggcaatatgcactatgaagtttggattcagatgatgcaagctaatcccgtagaaattcagaattccccggaaaaatcttgaggttggaagagaaaatccgccatagaagaaatgagcgaataccacgattttgtgtgtatcgggggtcaggaatgcctcaccaaatgccggtcgccacccgatgatctcttttgctggaagaacgccgtgcgccaccatctccttcaaactgtcttccgtcacatcggagggcgcccactgactctcgaagctttctctttcttccgccatgaatgtgaactggatggtctgatttagttcgagatacggctggaaagggatggggaatcggagcggtggatgtggggagaaatttcgtgaagtttttgagggtggattggagcggattgatgaaccctagtttgcccggcgcagttttgcattgtagcaggaaatggggaaaatggcgagagtttcggcggggaagacgaagagacgtttttcacttcggtgttattagggtatcgggggtactaatgggcctgggcctgtacagtacttcagcccaatactataatcagcgtggcctgttgtgatctctagggacttaggcactttttgctttggcaatctgtgttcacgatggtgtggcccaatgctgttaaaatcctttttaacgcgattcaataattctttggaattattatgatgcacataaaaaggcgcccgacagaaaggtgttataccattttttgtaagctttattaggctgcaaaagctgtttgggttgatttgagatgactggtttattaatagtcattcttttagcatgttatatgcttattttggttatggtaagggtcacagcctaggctattggactcattaattaccatgattttctatcctgtttggtgggtcattttatgagatttttactcggattcctatcaaacatgtctatttttggacctttgagtgtttatcactcggctcttcttgtattttttgtccttgatatgctcaagttgagaagcagtcagctaggtatcttactaagtatcatgcgtgcttcgctataaaaccactcggttcttgactatatgtttagtttttcaactaatcacatagtcgggggctacacctaattaggtgtatctactcgatgcaccatgttttattttcgcccttcacagtttttgatttttagtactcggcaagccggagcaagttgaattgaagcactcagattactgttttttgtttcgagaaggctattttgtcaactgtgaaggtctcgggggctactgtggagattatggataccccatatctacataacagttgtaatttagtcggatatacggtaccaaatatagatggaatatctctatgaagactcgggttaggttctaaacttgtatgtcaaggaaatactcgggatcttagtcggttacgattgtattttatctataatcccatattccgttaggatatggactgtattttgtaaagcggactccttcccctatataaggagggtccgtgtgcctcttggggggcgattctttttttccagtttatacaatcaataacacactcggcggaatcatctccggacaggagtagggtattacttcttgaataagaaggcctgaacctgtataaaattccttgtctccaaacccatccactttcctagcttgatagtcacccccttttattattgtcgaaatcttgcttcgacaatgaggatgtccaaattaactcatgtcgctgccatggtttcttgtatatgattgctgccatgttgattggatgcaaaagtgcaccattaacattattagagctgaaaggctcgtcagttacagttgcggcatccaaatcaattgatggataggtaccggatgtggaataagttcactttagttctctcaatttgtcgtccagtccagaaaaccggacaatacatcccttaatttataaaactagtacaaacgaggtccctcggcagtattgaccctggttttagctgacgtggatcttttgactaagtcttcgtcctactatgcattgacgtgaggcttgcgtgacagattgatccaaaaaaaaagagcaaaattgaaaaaaaataaaaaaataaaaacaaaagatgtggggcccatatgccagtcaagcaagaagataaaattgtgtgttagtgggtcccacttcctccacctcacccctctcctccatctcctccccctcactctcaatggtgagtcaacggcgactgcatatgccaagggaggcaattgtggcggaggtggccagcgaggcagcgaggagggagttgcggcgttccggtggaggagaggatggaggcgagggagccgacgagctcgagctcgccatccctgctccagcttcatgaggcgttggaggagtcagaggagaaggccgagccgcgtcagtgccaccaccagcagtggtgacggtacagggtctagggcggcgatgcttgcgagcaagcccttgcggtggtcgaggcatcacatcgtcggagggaggagatgggggtgtcggggaaggtgtcgtcgaggtattggaggataaaagactcacaggcggtgtggccggcatggaggaagacggggatcctcttgtggatgaggttggagcatagcaggaggttgctctagttaccgaggtcggacggggattttcccgacgcctagaagggactggcttggggggaggggctcgacagtggtggaggggtagagatggtggcatcgatgccgagaacgacctcctcctacgctcaaaccctaccatctccacccctccaccactgccgacgccccgccgacaacagagctcatcgctagggacaacagtgaagaggcggcggcctgaatctgtgcgaacgggaagggcgcgtggcggacgggcgagtaggtggcaatgggaacggtggagcaggcaagcgaggcgggcggcggcggaacgaagcgacagcgggtggagacctcggtgaggcggtgttaacagtgaaatttggtaatcgacaaagacgtcatcggcttagaatcattatcggctgcagcatctcggaatcagccgatgggagttatcaagtcgctaatagtcggattcctgttatattcggttaaggaaatcaatctactaaaggaagcttatccctaagtgaccgagtttaaagaggatgcggcatggcagtttatctattaattaggaatagtttgttagtttccttttatctttaggaaagtgtgtttagtatccgataatgactttatattttccttttatctttaggttagtttctttcttgtccgacaaggacttgtatcaacccatgggtataaatatgtacacccggggtctatgtaatctatctccacgatcaatataattcggcgcatcgccaccttttaccttttctactttattttattgtccagcggaacttggcacccgacgcagggctacatcgtcttcgatctccggcgaagggataagtccaatgttccgtcggcccaggcaattgtatcgtttacgtcggcgtcgttcgaggctgcatcagtacattcgacctcttggattgctctagtttggatgatatatttgcctacctatttatcatatgtctctgttaatctagccttagcatatcaatttagctctatcggttgcttctcgttttagggtttctgccggtatcggctaaatcgtgttgctagattagattagcttagacatctaccaccctgaaaactcagtcaacggcttgattgtctagatattatgtttcttttcatacttagtgctgcatcagttaagtttgatatactaagtcgtgcttagaaccataatctctagcctgcttcttgattgccaataagggtatcatcggggtttcagccggtgagttatctaaacgttgcatcggctcataaggattgcatatacatataagttggatttagccgatggcaacaaaggtttcactgtttaatctaatcttgtggatcttatgacatcggacatccaaccgatgtgtgcttcaaccttcggatcaatatttgttctactatttcatattgttagccgattggtttctactggattatattgctatattatattatcatcagccgattgcctttatatcattatctacattggacatatagccgattgcttaaaccctatcgctatcggctggtatcggcatcggctattatcgactatcggctggaactactccatcggcttgtcagccgatcggctgtttgatctattatttgcaaatcttgccagttgcaggattaaactgactggcacgctcgcatctcattaatctttggacctgcacaagagctaagcagatctcccaggccggtgtgttcgattttttcgtcaacaggcggggagatcgtggctgtcgtgagggcggcgctgcggtggtcggccacaccccagcgtcgccaacggggttggggagtgaggagggccattgagactatggaatgtcgttgtcgcgagcaaccccgctcggtggcccaaccggcgaacatcttccaggagctcgcccatcgctgctccgcccttctccttgtagtgcagggtagagagagggggatagagagaagatggagtgaggatgacatgtggaaccacatgagccccacttttttattattttgtgtgtagctggttatgtgggtcccacggtttttattatttttctaagatcgaattgtcacgcaagcgccacgtcaatgccatgtgggacgaggatctagtcaaaggagccatgtaggtgccacgtccacgtcatccaaaactaggcacaatgctgccgagggacctcatcagcatagttttgtaagttgggatgggttatatccggttttctagattgaggatggaaatcagactaggcaacaaattgagggaccaaatgtgaaattattccaccggaagatggcccaaggacctaattcagcccatcatccctcggaagatggaatattgtactgcattgaattacgtttcagggcatttacatacctctggattaattaatttcaaaacatagtactccactaagtttgaatatcgaaaaacatatggagatgttatacagagtagaataaaaaaagactgagaatgtgttggcatcaaaatctttgctaggccctcaaaagctttaattacaggtttgaaataatctcttcagacctctttggtggttgagaagaccccccctactccctacctaaatcctactccaggaaatatgtatgaaaagaagacacattgtacaacctaaacatgatcaaatatccaggaaatattatattagcatatgataatgttatcaagaagcaaatgaagaaagttagcgcgatgaatagcacagcacgagcagaaaaacgaaaatgactacaggactaaatgcaggagcagtgagcagtccatctatccattcatcagctgattcttgtactggcaggctagtatctatatttctatgttcacaacacagataacttccacaaagttcaagttaaagctggccacaagatcaatccttgctgcaagtttcatgctttccgtagcttagcaggagagtagagtaatgaatatatcaagagatcaccaacataagacacatgtgaactgatggaatagaagaaacgccaaggcttcagagtcgaacatccttcagaaaacatctgcatggcaaaaaagggggtttcatatcaaatgtacagggttactacatcgataatagacaaaggttaagatgattcacaagacattagaaatgctaggcagctgaaggagaagttaaatattttcgaagtagaacataatcaaattccatgccatgttccattgatgtcccagttgtgaagcgatttgaacattgcttggattgcgaaatttggcggtatgtcatgctggcattaaagaatatatcatctaagcaaataaaatgcagcttgcaccagagaagagtaagcagggaggcctaggaattgttgtatgggctttatgtttatacagatagattaaacaatctgctgcaaaaaatatcaaattactcaatatagaattagaactgttgggactaagattaaaagaaacatatatattacaaggacactgacatagacaataatatccagaaacagtatctgaagtgcgagtacggtaggataaatggcagtcagacatactaggttctgcttctagttagcgcttcttatttgatgttgaacaaaataccttgttggctcttgttgtgatgggaatttacaccttgtaaacagaataatgaaaagaatggagcatagtctaaatctgttttttttttccatcaacagtcagaatataacttacgatcataaatagacacaagtccaggacatcaagaaaataagaagatttcatctaatcctggtcagtgctgactaacattgagggaaggggcagaggaggtggtacaatcacaggatgaaataatggacaaatgaaggtgacaaagtgtcataaaaagtgcttgtgtgctgattgatgtttcgatttggtttgaaccgataacctttgttcagttggtgcaagtacaacaccactataataatcatgccttctagtttgtatggaaatgaggcatcttgtattgtcgatcattccagaaacatatccaccagacagttcatcacaaattgagttcacccaacaatattaggaaattctaacctttataggactgatgaatgaggttacttttgcagtataatgtagaagcttctgataaatcaaattcaacaatcccaaaatctaatactaatgtttagaatcagcattattcaatcttaaaaatattatgctatgaatcaatagactatttgaaccatgaagggccaaaggaaccaacctcgtcagaccctgagaagctggaccttgttctcaaaggcaatcgatatccactccgggtaagctgccgcccattgcagttggtttatctctgcaccggcatcatacaccatcacaggatcaatcccctcggccggcactgcgccgggcgtcgctggcagctcccaaatcagcgcttggccgtcgtccccagccgagcaaaggtgcctcgtggcctgtggcgcccaagcgaccgcgttggcgcacgcccggtgtctgtgtagttcggccaccggcaccccgggcgcgcgcatgtcgagcacgacgacggcgctgctgtccatgagcagggtggccatgtagtggaagtcatagcggttccatgccagcctgaggagcggcgtgtccgggcgggggctctcgtagaagatggtggaatgctccttgtcccggaggtcgaagacgcggacggagccgtcggctgagacggaggcgaagatgccgttctccccccaggcgatgtcgtgcacggccttgtcgtgcgcgatgagctgcgtctcgacgacgccgcgctcgatgtcccagatggtgcaggtggtgtcgatggaggcggtcccgatgcggcggggctcggcctcgttccagtcgaaggaggtgaggggggcgcagaactcggaggcggatgtcttgcggttgtcgaggacggagcggagctcgggcgcggcggcggtggcggtggcggcgagatcgtcgagcggggcaagccagagccgcagcgcgtcggaggaggaggcgaggaggtggggcgcggaggcggcgcgcgggtggaactggagcttggtgggcgggtaggggtggtcgaaggagagcgcggggagggcgcggaaggaggcggcggtggggtggacggggtcgaaggagaggagggagacgcggttgtggaggtcctcgaggaagctgccggcggcgaggacgggcgcggagggggagaaggccagcgcgtagatggagtgcggcagctcgcaggtgaaggcgttcgggttctgcgcctccgccgccgaggcggctaccgacggcggcttgggctgctccatgggaaaaatcgttggattcgcttcgctttgcttcctttctttctcgggtggatttggggatgaatggactcacgcgccgcggtggttgatcgggtcggggagttcagagtaaaaaacgcgagcagccaggccgagcaggtaggagggacggcgaaggaggaggcgcgtcaacgcgcgcgtgccacggcaaccggccggtaaacgtcagctcggcacgagggttgaacgggcgacgatgcgggcatgcggccgccgggctgctgcagttggtggccgcctgaagctgattcaacggtggggccagaccgtcagtgacttatagtcaaagctggtttcgactttcgactggaatcagtttaacttaaacaggatgtactcatttactcaaccagcctctcatgagttcttgagcaaccggcaggacaggtcagtcctctcaagcaatgcaaacgatgctactaccatcaggatagggtagtgccccatggggaacaaaagaaacaaacagttaagagaaactgcaaggcagaatttgcggcttttaacagctgaaaaccagcttagctaatagttgccacttaattaatataaaggttgctctctttctcacagattagaaaggcaaaaataacgagtctaggaaaaacatttttccccaattctgatttaagcagcaactgaaggctacacatcgtcgctcagcgtgtggaactgaacagagctcggctgacaataccagttgcctcaatgtaacgatcaacacagcgtgatatgcaactgctctcgctcccgctcaagcttgatcctggctttgtcacgcacttggcaaagcacttgtttccaacagtctgtaacaacaaaacaagagagaattacaaccatgtcatgtgtttaacaaagaagcaatgcctggaattggcatgttttatttcaaacactaccctttttctcatgtaatctgtattacatatatgtcatgtaaaccaacagtggcagaatcacttgatcagcaagactaagggtgagtttgaggagaaggtgattgaggagattgggaagatacgtaaaacgaggtgagccattagctcatgattaattgagtattaattattttaaatttcaaaaatggattaatatgatttttaaaagcaactttcctataggaaatttttacaaaaaacgcaccatttagtaatttggaaagcgtgcgcgcggaaaacgagatgttatctccctcaatgttacccgaacgaacgcagcctaattactcatatgtcaaacttcgtagtaatagtgtagcaacaggaagggtcaacttcaatgctaactttgtgaacacatattttacctttctggtcgtggcaggccagcacaagttaatagttctgactctatgttgagttcaaatatataatgaacacagaagtgaaagacatacaaaatgtcaccatagttttaagcaaaggaaaagcacttgaaatagaaaatgcaacagttagaagtatataccaaaactcaggcctgtattataaagtctaggtgactcgatgtccctggtccagtcaatttaaatagtttactattatatctattggttttataatatgcttaagtcatggatatgtactggatcctaagttccttctatcagtcctacaaggttgtggtcatcactagactggggagatcttacctcatcaagacaacattttaagtttccaaattcaatatgtattgtaaatgatagatgagtttgatgcacctattccaaatacgttgttacagttcaccaaagggtgtgctcaactgtgcttgctgcgcagccacagcagccagcatatcgatcaaccccaatttctcttggtacttaaagtgtgcattaagactgttaaatttatgctcttcaatcctcagttttcttgataaattcaagaaatcatcaccgtataaccgtatatgccaagtaaaaataacaaaagaaatcaacagatgagccaccacatccaattgtgtgattcaattggacatttggacgcaatgcacaccagtatgatcaacttgtatcagtatgcagattacaatcaatggatacagtgagcatgaaagtcacagcatgggcatgttgattccaatttaataatactttcttaagcggttccaagttaataatccttttcttggacaaaggaaatcaatttatgagttttagccatcctatgcaaacaataggacttactggagtgtaatgggattgagtatagatttaatcatacaagatacaaggatacagaaactaaaatccatcctatgccaacatgtttaaactgtatcgccctccaatccggtaaatggaactgttgtaacttgtagaacatcaaaccactctaacgaagctattgttaagcttgttgaaggtgctactgaatactgatgctcattactttagtactagaatacggaaaaccacaaaacaggaaactaattctacccccaaatattcgcttccgtagagtgctaccagcgaaatctagtgtcacctaaaccaagtatccacctacctaatgaatattcatccatacagattcgcattaacaaacgtgatacaagagaggaaacgatttgggtggggaggatctcacctcaaggaactcctgggcgtaggcctgagcgagctgcgccttgatctggtccatgagcgcctccgtattggggggcgacccggacgacgacgagaaggagtccatgccggcttcccaccttcttgattcccaagccttcgtcggcgaccggttgttgaagagcgctctccagcaacgacgattctccggcgcggcggggtgtgcgaagcggaggaggcgggcagagcggagtaataaaaccctagctttactggatcagaaccacgaatccacgattgggaggaaagggtagtaggcccacatttatcccccaagaaagagcccatatagtaattgggccgtacagcggaccatctctcgtggctatgtggatttaagccgaaaaaagtctactttgagtccttaaagtagtccgaatctaatttgtaccccttaatcagaaagttaggtaggacgactccccaaactattggaaccagtataatttgactccctcgaaggttttggaggacagtttcgctgatgcggtactttgacctagtataactggttgagttggtgtgtggggctacctttcttctcttcgttccctatcccctcctcaccttcctctccgcgggaagcatcagggcagcagatcgacggcaacagggggtgcacagcggcagtagcaagggagctaggccccgaaggaaaaccgcgcaccaccatcagacgtggcacccccacgttgggtcacgccactggcctcgataaagagccgtacgcatcggcattggtcgtggcaccatatcccaacctcccccggtagatggcggcggcatggagcggaaaaggggtagtaggggcggcagcgcgttgcgagcgattcgaggcgaaccgagcgacgacgcgacctcgtggcggagagcggcgatgtctctttctcccttcccacacaagtacacgattcgagatgaaccgagtgacgatgcagctgagtcggagcgcagcacgacttcgtggcggagagtggcacaactttgaggcattgcacaatgcggcccaaggaggagcaagcggatctaagcgggtcacgtcatcgacagccggaccacgccaccctccctgtggcgtcagcccataccactagagcacaccgtgccctccctgtggctcccgcgatgctcgaagccctcctcgtgaggggtgcacaaaagcttgaaactcatgagctaactcaactcgagtaaaactcgggtcgacttgagtagttaatgagtcgagttgagtttgaacttttacttgtttgcttaacgagccaactcgagctagctcatgagttacttggttagctcgctgagctcatgatgcattaagatagaaattgattgttcatattttgcaggtgtaaaagtcgtgaactcataattatacattatagcacaatcttatgagtcatgatacatagcatggcaatcataatctttggtcataaaatcacaaattatactgcatatgaattttaaaccatgtatttcggtgtaacgagtttagtgagtttaatgaatcaactcagacttttattgtgtcgagtcgagttccatttttaacttgttatgttaacgagtcgagccaagatagctctttaacttaacgagtttttacgagtcgaggtaagtcggcttgtgagccacccaacctcgtggcgtcggcccaggctgccgaagcacgccgcatgctccttgtggccgctgcgttgctcaagcaccgtcacgttgaggccctctcacagtctggctcctttccccgctgaccaccacccactgccctggagaaaaagagaaaataaaaaggaatgaagaaaatgtgacactaacactgagtcagccgattggactgggtctaagcaccatgtcagcgaaattaaaccacactccaaaacggttaagggagtcaaattataccaatttcaatagttagggtagtcatccggttttccgattaaggggtacgaataggattgtacctacttttttaagggagttaaagtagactttttgcatttaagccttggaatggcctacgtactcacatataaggaataagttcatctgaggtcccttaacttgtcaacgaatccgattttcatccttgaaccgaaaaaccagatacaacgggtccctcaactatcaaaaccggtgcagattaggtccttcagcggtttagatagcggttttggatggcgtggcgcctacgtggctaatttgatttgttttcatctgacgtggcattgacgtggcgctgacgtggcaattagatttgaaaaaataataaaacccatgggacccatatgtcagtttcacatataaaataataataaatggtgggacccacgtgggccccacatgtcatatctatcctcttgtaacatcccggcctagggcttaataagattaatagaatactcatatcaacaagttgcaacttcttttccggaagccaatctccaaagaactccagggttaagcgtgcttagcctggagcaatttgggatggttcccgggtgcacacgagtgaggacaaagtgttgcagaaaagacatgtgttggtctgtgaggtttcacgggcgcgtgtgtcgcagttgcgcaggcatggtgcgcatggctggtgtagatcgggagtggttacacagcatggcacatgcgctgggtggccaagagaggacgttcctggcctggggttgatcgacgggggcgtcgatctctcttaagggggttaagcgtgcttggcctggagcaatttgggatgggtgaccgaccgggaaattcttcccgggtgcacacgagtgaggacaaagtgttgcagaaaagacatgtgttagtctgtgcccccgtcgatctctcttaagggggttaagcatgcttggcctggagcaatttgggatgggtgaccgaccgggaaattcttcccgggtgcacacgagtgaggacaaagtgttgcagaaaagacatgtgttagtctgtgagggcagtctatgagctataaaagctaccagatgtaagtgggcccggcctgggagaggcgggtcgttacacctcttcacctttcaccttcccctttaccctttctctctcgtgcatggcagcgacggcacgcgaggcggaggagggaggggcgcgggggtggtggcctgccggcggcggtcgcccctgccctggagcgacacgggggtggagaaagtttctcctcttatgtccacatctgtagagaagaggttaaatcaaggaaggttgcatcttgttcttgactgattaattggtgcgccataatctgcaggtaaactggttcttgcctgacacttgtcttgtccgggtggccaccgtggggcagcctggtgccatgagaaggatcaccgttcactacgtgaatttgctgccggtcgccggcgccggagaagcacacgtcgatggcgccgcgaattattccggcaaggtacgcacgacggattgattgttcgattgattggttgaccgacgagatgaattggttggtttggtttgttgggggactcgcagcagaggagcagtgtgatggagctcatccatcggtggtcgatggacatcaatgcctgggaggcgaaggagcggctggaccagaagctgaggaaccagatggaagccgtcatcaagaggtaactgatgatgcaaagatcaaatcatttgtttttttgaaaagaagaaagatggattgaaattttgctgaattgtttttcgtcgtttcgtttctgcaggcatcacagcacaggaagcatcaagctgaacagagccagcagtggaggggggagatcgacagtgacggcggcgatgggggtgcagagggcggtgtactcgaagaaaggggtgatgcggcggctgatgcggtggagtcgactgcggtgggacgcggcggagcaggcggagtgcacgtgtgcctagaggagttctccgccggcgacgccatggcccacctcccctacggccgccactttcactgggcctgcgcactccctggctcgaggctggcgccgcaccccgctcctgcccattctgccgcaccgtcgtcgacacgccggggaaggggaagtggaaggggaaggtgaaaggtgaagaggatagatatgacatgtggggcccacgtgggtcccaccatttattattattttatatgtgaaactgacatatgggtcccatgggttttattattttttcaaatctaattgacacatcagcgccacgtcaatgccacgtcagatgaagacaagtcaaattagccacgtaggcgccacgtcatccaaaaccgccatctaaaccgctgaaggacctaatctgcactggttttgatagttgagggacccgttgtatctggtttttcggttcaaggacgaaaatcggattcgttgacaagttaagagacctcagatgaacttattcccacatataatgacgggcccatttcatgttcgaaataggaagtttttggactatacaaagccgattttgctaaacatctcccgcgatttttttcctggcatttgatgtttttttggccacatgatctttgcaccaagatttgtgcagcaattgccgtggatgaggtcgacagggagtcaaggtgtgttggtattgccgtgtgaataaaatacgtgaagtatgtaattttcatatgtcaaattaagaaatatctctatgttaatttacatgtcaaattaagtactaatcgatacaacaaatttaacatatcttaaacatctaaataaaaattgatttctttaaccattgaaaaattaagatatttgaaactaaaataaaaaataaaaataaacttaaaattacagtcctatataactaaaattatatttgtaaatttagttgatttgacatgtaagtgcactgtaattttgataaaaataatgggtaagtaaatatgtacttattaaattctttaaaatataaaattacagtcttatataactaaaattacatttataaatttagttgatttgacatgtaagtgcactgtaatcttgataaaaataatatgtaagtaaatatgtacttattattttctttaaaatataaaattacagtcttatataactaaaattacatttgtaaatttagttgatttgaaatgtaagtgtactgtaattttgttaaaaataatatgtacgtaaatatgtacttattattttctttaaaatataaaattacagtcttatataactaaaattacatttgtaaatttagttgatttgacatgtaagtgcactgtaattttaataaaaatgttgtgtaagtaaatttgtattaattattttattttgtagtccgttggatgtaaatccaaggaaagaaaaaatctgggtgattttttctcaaaaatcacccgagtgatgtataggcagtcccatacaaagccactagtgtactactactgtatatatatatgagattctgacgatttccatgagaaaaccaggagattgtcctaccttactctgcgcgtgcaatacatccatcactcaatccatccaagtccagacattctggcaactaggcctagtcacgatcacgggaacctgactacaaatccagattcatcaaacacatcaaccagacgattctggattataattattttccgccgggccctggattataattatcgatacagcatcactgatcaggatcaggcattggcgcattgcctgttgttacagtaaaagaacagtaaaaccattggtgtacctgtaccggacgccgggcgagcaatggagagggttgctagttgctactgggctgtacagcagaaggcaggcagcgccacagcgcgcggcgtgtgtgcgaccccgcttcggcgcggcatgcaaagcctgcggcatcgtcgtggcaggggaggggagtggagaaggggggaccccgcctgcctcccggaaccatccaaatgcaaagttcaaaggccctgtagccagagcgcgcgtcgtagcgaaagccagagcgagagcgaggtggttctcgccatgcatgcgcgcgggggcggtcgcgtggggggcgacgacgtctcgcgcctgcaggccgcgcagctaagctgcagtccttgttgttgtggtcatcactcactcacgcatgcatatggctgggctgtggctagcgaacgacgacgagcgagctagggcggtttgccggtgtggtggccactgccgtggcatgaagtagtattcacctcgccgtggtttgatcctggctagctgtccgcctgatttttcacgtaatcaccaacctaacgttagaaaacgatatgaaaacaaacgataaaaaacaatatatcgttcacggaagagacgagatttaacgtagaaaacccttccaaagcaaaagagaaaaaaccacgagcgtcagccagtaaaatatcttcacaatatcggggtgaggttacaacaccgaacgacggcttacaagaggtatatatatgatatgaaattctaaaagggatgacgatccgtacctctgcttcgctctggcccagcctctggcatctactggcctccacttcacctttacactactagaaaacgcatttttcccaacgcaggggtctttttttcgcaggcggacatgattcttatagccaaatgaccgcctaaaaaatataaatcggggtgaagttcgctgtccgcctgcgagaatctattttcgcaggcggaccacttaagcggcgcattttcacaggcagactacttaagcggcgcctgcgaaaatagattttcgcaggcgaaccttatgtagtccgactgcaaaaatcgtacctacccaaaaaaaaaccccacccttatcttctcatcccacccctcccaccactcaactctctctctctctccttctccctccactgactcagtctcactgactctcctctccctcactgactctcctctcctctcatctccggcggcgcggcggggccgacgacggcgcggggcggcggcggcggcggcgcggggcgcgtggccggcggcgtctcccctcgccccctccctcctagatctggccggagggaggggggaggccagcgagggcgacggcggcaacgacggcgcggggcggctggcggcgtctcccctcgccccctccctcctagatctggccggaggagggaggggggggcggcgagggcgacggcgacgacgacggcggcgacggcgcacgtggtgcggcgtgggccggccggcggcgtctcccctccctccctccctcgcagatctggccggaggagggaggggggaggccaacggcggcgaggacggcgtggagcagcggcggcgacgacgacgacggcggcagcggcggcgacggcggcgacgacgacggcggcggcgacggcggcgacgacgacggcggcggcggctcccctcccctcccctctcagatccggccgggggaggggggcggtggcgaggcgcgtggcggcggcggtgcggcaattttttttgttcgtttttttgcattttcgcagacgggccgttgccccgactgcgaaaattatcgattttcacagtcgttgtgttgcaggcggacctccctcccgcctgcgaaaattagttttggccgcttgaaaaaattagtttttagtagtgttataaagtacaaataaatttggatcacaactcaacccctaacgcccggatcaaaccactgttcgattctttcttagccgaagttttgcgatgttggtgggctcgacggatgggagggcctgctttactggagacggccgggtgggcccctcctgcgctccggttaactgcgcccatgctatgtaggtttcggtggtgtggtggcgccatcgtttcccggtctggagaccggaactcaccacctccgtctcgctctcttatcccctcgtgtcgtccggccggggtccggccccgtggacaggttagtgtttacccactttgcgatccttttttctcgttctctttcgtcttttcgagcagcagcagccgcagccgcgcgcgtgacggggacgggccatcatgtgcatatccatcgttcgtgcgcgcatgatagatgcttctgcgtttgccggtgttgcgctgccccgtcttaatgcaaatatgcaatcataatgttcgcgtggatcatgattggttggttgattacaacgtgcactgcgggcacggcgtgctaccactgtacacgcgtacatcaatacaaagcgtttcccaaaccgccgggaccggggttacggcgccccggcggtaagcacggttaccacgcggtaaccgtgaaaaaccatgtaaaatttatcacaaatttaaattattttttaaatttatttaaatttaaggaggttaccgcggtatttatattgccgtaccccgcggtaaggccggtaaccgcgcggttaccgacggtaagggaaacccatacatatatcactcagatctacgagaggatctccgaaccgcgcgagatcagtgatcgattgagagttagatcgaaaagatgtgcagatgcttgagttcagtatatatattaaagcacaacacacgttatattataccgtaaaagttttccttcttttttgattgttgtgaattaatgcagtgtatatctatctatttaatctaataaaaatatgagggaaagtaggctggattgattccttggttcgtgcatgacagcggggaggtgaagaacatctcctgttctagatgcgaccaatttgatcctccgtgtcaatcatatatatcatttggtatgggccatgccacctcttctcctcagtcctctgcgtgtgctttagccggcaggctagcttgcgcgatgtggtccaaaactaaagacagcatccacatctcccacctcctaccttcggcagcgacgtttgccggtcggccggccgccggaggacggatgtcccttcaatctgatcgatcccctctccggcatcacagacgaatacagcgtattagatatttagataggcagctatcagctggctatagatcgatgctctttctgaagtccgagaaaatgaagtgcatgagtacatcgtctgtactggggtattaatttatcaaccccaaaccctgctgaccttcagtgagagagagagagagagagctgcagtagttgtgtccatggatgggagagagagcgagcatgggaacaaaagcatgtacaagccaggtatgcatgccgatccgcctgcgcttctctgcgtgcacactacggctggtgatgggagcgctggaaagctgaagacgcgagcctgcgctcaagactacttgtcgttgacatgaactgacagttcgtttgtttctttctacatgcagtgtcagtttatgtatggccattgtgctcagccactcggagaggatctacatatataggagtatatatcgatccaacctctatacggaaacttgcaggcagaatagctgtagtatcttttctttagctgtacaaaatatagttgtcgcatataaatagacagcacatgtaattttggtttacagtagatagcaatagcctaaagatatttgctagctaagatttaataaccttccaaatgagtcgtcagttgaaggatttcaacaattgagagccgcgccattgatatgtgcaattaacttaaccaatggaaattgatactccctccatcctataatataagggattttaagtttttgcttacactgtttgaccattcgtcttattcaaaaaaattttacaattattatttattttctttgtgacttactttattattccaagtactttaagcacaacttttcgtttttatatttgcacaaatttgttgaataagacgagtggtcaaacattgcaaacaaaaactcaaaatctcttatattataggacggagggagtaataaatatttatcatgttataacttataagaaattaaaccaaaactggcaacactggcaacaatgacggtattggtagctaaacacagacgaacaccatagaagatccaacctttatgatggtaccgaagcatgacatttgtgaatgaggtccagcagaagctagcctacatccctactggttataggcatatagcttaatcggccatcgactagcgtaattatagtgtatctgagtatcacacttctcttagatctagtacaattacgatgtatctgagtatctacgaccttcgaatagcttggctgtcgcccagtagtatctatacctatgctatagtcaccatgttaccatgcagttaaaacactacaacaaaacttgtaataggagacgcaattatatgtgtcggttcatctaaaacagcacatatgaggcttttcccgctttcccaacccctcatgtggatctaaaataaaaaaatcggcacctataacaccttataagtgccggtttattaaacaattgcgctttagggatggagctgagctgaacacatatttctctgtttttttaagtcttcctcagtctaaagtcctaatcttatgttctcccaaccaccccctctctctcatactccatccccattcgctctctccccacctcaccaagttggcgagcgatgcatgcaacgacgatggctcgtctctcttgctgacgtgacgacggtggttctactacctcggtgacggcccgcctattctcagcgatgccatggcagtgtcaggtcctcctcatgctgccgtcagacatggcctcggctccgtctactggatttgatggtgatggcgatagaattggcacctacgccaaattcagcgggcccaagctcaggggtctccgaatatggccccagtatcatctcatctaccgcaccaagaggggttgccataaccacatcgcctcggtggctaggtccccagatttgacctcaggcaacggcaagacgcaacgtcaatgctccactattgtaacgtcccgtcttcccccaggccgggcccacttacatctgatagctttcataggtcatagactgccctcacagaccaacacatgtcttttctgcacactttgtcctcactcgtgtgcacccggaagaatttcccggtcggtcacccatcccaaattgctccaggccaaaggccgggatgttacaccctcacccccttaagagagatcgacgcccccgtcgatcaaccctaggccaggaacgtcctctcttggctacgcccatgtgtccagtgccagcgcatgtgccatgctgtgtaaccactcccggtcttcaccagccatgcgcaccatgcctgcgcaactgcgacacacgcgccgcgagagtcggctctgataccattttgtaacgtcccgccttcccccagaccgggcccacttacatctgatagctttcataggtcatagactgccctcacagaccaacacatgtcttttctgcacactttgtcctcactcgtgtgcacccgggaagaatttcccggtcggtcacccatcccaaattgctccaggccaagcacgcttaaccctggagttctttggagattggcttccggaaaagaagttgcaacttgttgatatgagtattctattaattctattaagccctaggccgggatgttacaactatgaagagcttcaagggcctcgtgaggtaggactcctccttgaactggccccctccctgttgcggggattccctagcaacaacggcgaggacctcaactgctcaccatcatccagcaaccaggcccaaggcccgattacttcgtctccaggtggtgctctcctttgcgtttttgtcttgggatttctcgatttttgtggaaagggaaatgtatgggagtttgtgttctagggcctatgagttcttgttggatctgaatatgaactcttgtgtgcaatgtagctagcttattgttgttgatgtagggccttatatgtgatgaatgttcttgatttgtttttccatgaaatacaatggacgttcttgatttttctcccatggcttcttaatctatgccatggatgtggatatggggggatgtgctgctcgaagcatcggcacaattcatcgagccgactccctttttttttctccgtcataggcctcacatgtgttgttgtgcctgttttgaaatcgacaccaaaagcatggctcatcagtgccggttgcagaaaccagcacatatatggacttatagaccgacactgtaatagcaggcccttcggaactgcacaacccaacccatccaacagacgggcatacttacacatactatcccatttatactttcatcctcacttcgtgtaaaacggttaagccaagagtgacatggttggagagacaagctcttataagttggttctatacttgctaaactagcaagctggtattaaacatgcacacatagctctcatgcgacacgtaagtcttatcctaattgggtcaggatgtaccatacatacataaggccatgaaagactttagaacacgctaagttgttatgaatacctgaattcctagtttgggcttgtaaataatgaaatggcactaaatgtcttggtaatgagatatattatcgctattgggggagcggctttgccctcgtcctagggaggcagttgcccccttttcttctctcttttgtctctgtctgtgcatctcaagaccggcttcggacaaggggcccctaagaaagcctttggaggggctttggggaagaaagaggccccccgtaacccataaaaatgcctcggagaggggcaccctgaaggagcctacggggtggcttccccgacacggggctcccaaataaggcattccccacggtggggagatggcaacaacattgatggggcattcaaagggcaggctcaaccactcctgacatccacgaggaaaggccctaagcaatgtatacatttcgctctttttccttgtgctcgatccctattggattctattccaacataccctattgcactctttctccttgtgctcgatcccttttggattctgttccaacatacctccatttattaaatagatgacgtcattgacttttagacacacatttgatcatttataatattaattttttacataattataatttattttgcagcgagttattgtgccactaaaaagtattataaacatggtttatatcttatacatttgcatacaatttttaaattagatgaatggttaaatatgtgtccgaaagttaatgatggtctctattaataaatagaggaagtatatgctatgtaactttactttagcacacggcagtatataggaatctactgaaatgaattaaggtcatcacacacgaaatttcgattactgatcagtaccaaatggcagctgggatcacagattagattcagaacaattatactaattcagagtaattaaggatataaaccttcaataaatagaaatccttatttatatagatcaagtaacttgcactggaagcacaaatttcttaactgtaatagatcaagttatggtaaaaaaaacgtaagttatatacacacactcgcgcgtacaaaaattaattttcacccaagtaattaattcatcagagaatatatgcaggacttgagttgcatatatactccctccgtcatctaatataagggattttgacattttgcttgtcctgtttaaccattcgtcttatttaattttttttagaattattatttatttttacttattttattatccaaattactttaagcgcagcttttcgttttttatattttgcacaaatttttttaataagatgagtggtcaaatagtgcaagcaaaatatcaaaatcccttatattaagggacggagagggagtagttattattttcagtttttcaccctgataaataaaaaatgcagaatcatgatgggcaataatgcataatgcacatctcatgcaaacactgcggttgtcacaaaactaaaccacaattaacaccagtacacacacatgtacactaacccatatatttatcgatgcggttcgttagccatatgattcccctcgtaactagtaccacatgatcgactagtatgcagaatttaagtatatatatatatatataaataacgatgtcttgcttaattttgacacatagtagaatttaagtatgcagagtatagctagctagcacttagggcgctccctttgacatatactatgcaggaatggtaaaacacataaatagaaaaaaaacacaacattttgggacgaatgcatatgcaaaacggatgaatacacaaaacatatatatagaaacacggaaatgggcgtaaggtgtttgatagactcttccaattagaaaaacatatgatttagattagagagatatatagactcaatagaaatcggaaaactccaattcgtttcttaaaagattaggtaagaatactctataggattaaatcttaaaaaatttcttcacataccatttgtctcgagggaggtcttaaaagatgtttctgctgggtgctggttaagagagacagtttacacttttacagccgcctgccatctctgccatagtagttcaaaggcattgatcagataaggaagagtactcgtatatatatgcggctatatacgcgcgctgcccaggcaggcagcacgccaaatatgcccgtacctcactattactacacagtgaaaccagacgttgcagagcctgaagaaagccccccacttctctgactatctgaacatcacccatgcataagctcatcatcgccctcgctctcacagtcacatgcatgcatgtatgtgtgtacgtatatctgcagttatgcaatgtgtaactggcccatgcatatgtactatcagccagggagaacaggctcgatcttttaatgctactttaatttcattattttttttatatactgttgctatgtggatatatattgtacacatacctgtatcaatatatgcatcagtgcatgtgttccctccgtacgttttagttgcaaaaagaatagccaaagattaacattttgttttatattccaagtttcccatatttctcttctagatccctccaccatcctccatctttaattacaattttatacacacacacacacacacctatcattaactcattatgtatgcatgagatgatgagatattattgaggaatgctttgctagattatctaaattgaaagtacagttgtcttggtatatgcatttttaaatggcaaaatttgccacaggacatgcaaaaaatgtgtaattggttgtaggacaccggtcgcattattttattatttccgggtcaaaagaggtgagatatttttctaaatgcccagattgcccttctctttccttccttttctcttactctgtccttctttcccccttcttgttgatttcgccgggaacggcatagcagcctcaaagcagcggtggggcgaggtcggcgcggcgtggtgcggaatcaccagcggccggggcggtcgatggcatggcgcgaccatggaggagtggtgttcggccagatcgatagcgggcaggcgacgacagtgccggtgcggtggggcgcggccgggaggcagcaccaagcgtaggcggggaggctacgatgggtcccggcatcaccaccgctacgatggccagtgcccttgctcccttcggtgcgcttgacgagtgccgacgactgcggcgggttcagatcggcgccgacgaagaaggggtgcgatctccctctccggtgcaccatttttcggggtccttgaggggagatggagaggaggatgaggcgaagatgctggcgcgacagcttggcccggcttggtccagataagtgggaatgtcgatgatgtcgctgcggcggtgcgcaaagcacgctccagagctccggtgggcacaacagcattcccgtcgattggctgcacgaatcgagaggttgtcaaagcaagatttgatcggcatggagagaagataatagaacatgaattagataggaacggagatagctcgttggtgatcagcggcgtcctccttctcagcggccgacgacgaaagataggtggagagggagagctggagctctcttcctcggtttgctttgtgtggaaatgaagtggagtagatggtgatgcagtagggacgagatgaagactcgcctcagcattttgaggcgttgacacgtcgtgcacacgcgtcgaactcagccggcgccgatctctctctcggctgtctctggtcgatctctctcccatcgcgtgctagctcatgtcgcttggcccaacctcccccaaacacgacgagctgaggaggctattctccaggttcggcaagatcgagagggagaagaagataagggcaaaactgtcattttacattgtttctctctcatcaattgaccgaatattatattttaatgtgtccaatgtcctgtagcaaattaccacatttttggagtgtcctcgggcaaattcacgtctttagggtgttcaacagctaattacacattttttgagtgtcctgtagcaaattttgcctttttaaatttgtcaagggtgtatcacagagctttgtcaacatagatcaatcccacttaagtgccatacacatgcatgtcaatgagaaatcaatatgtgatctataaaaaaattctatattccaaatatatatactttcttgatttctcaagtgtaattagatatatttgtgcaacatgtcaatcagctctgtaatgaagtgtttgttctcaattaatctctactccctccgtccctaaatataagggattttggttggatgtggcatatcctagtataatgaatctggacaggagcttgtccagattcattgtattaggatatgtcacatccaaccaaaatcccttatatttagggatggagggagtatgtcccaaaataaattaacctagtacggaatgtgatatattttagtactacgaatctggacagctcataaaatgtatcacatcccgtactacgttaacttattttgggggcagaaggagtacgattcctcacatcaacaactccgcacaactaaaactaaccaaattttagcaatatatagtgcatgcatgtattgtagtatagatgtaattcatgagttaatatgaaaaaatataacatacataaaatatataactaacgactttagtgcgtcacttcccaattgtgagttatttttttaactgccgccttactagatagctagccctacattatgatgtcatctcagaaaaatcatagcaaaaaaaaaaggttttcgaatagactatatatatgttagacacaacgtaaaactttcaacatcttgttgttttcttgtggactttaagtaccttcattttttttacaattaattgtaccttcttgatcaatatatatttgcttgttaactaatctaatgattaattagaaatacatgcatgcataggcgttcccatattatagtattgattaccacgtgaacataaaagtggaattgctagatttcaagtgcctaaaatttcacatatagtacctaaaattaattgcagtgctatgcaaaatgcgatttaggttcattttaactacattatgttgttatatatatggtttgaattcatttttgtctatatatgtttgaattttctttcatgtatcttaatttgtaatgttttatgagttatatgaatttatttgtatttttgtatttttttcttgtttgttagaataatttattgttcaaccattgggtagttgtaagtaccactaagtaacaggaatgtaatggaaccattggattattatctaacaagggacgataaaagtgagtggactttttgaaaatttcaggcgcctaaaatctagacactcacgaaaaaaataattacacaagggcatgatgatttactaacacatcttgatatgttgttgatcatatgtaaccataatcaactcatgatcactcatcatgtatatccaaaatatttggccttttagccctgtcgtaggttttaatttgcctagtagtactggccatattatatatctacatcttcatataaaatagctcactagcaagataagtatatatatggacaggaatagagctagacaccataagttgccatttcatcctggtaaccgggctatatatgtaatatggatatttgtcaccttcacaaatacaattattgtgtcaatcagtaatatgctataaattcattggagtctgttgtggaccctaattacaactgaacaatatatagaagtgcatgttactatgcagcctatttaaacttaaatggggagaaataaattaagatagagttaataaactagggagaaacatatatatataaggagactgaaagcaaaaaaggaaaataattgggcttagtgggactaatgcccattgaaagaagcaagaatcaccctaaaaaacaaagaaagaagcaagaatcaattggaaagaggtaagaactatatattttcactcaaacaaaagctaattaaactatatgcgtacggaaaatatatgtctagatataccatggtatgataaccttgctggaaatgaagatatataagatcaatgttctgatccgctcgatctcaatttgcaaaatattggtcatttcagtatacagattcacggaacaagaaataattaagctatgttttgactatagatactcagatttatatacttgatataattatgttccaaggaattaattagttctctgggagattggcaacactgtcaatctatggagaaactttgttcagcataactggggggggataagagatgtaatagaagcttatttatgaaagaattaatggatcaaattagacatctattttcatcatgtatattactatatatattaattacctattattctcaatctagatcatatatatcattagatatagagatagtaaactagagtttatattagaacttaagaaaacgagcaagactagctacatgtaaagttttcatgctaggtgatgcagataataattaagaaaaagacgttctaatttcaggcaagatgctacattttaatttctgtgcttagctactcaagaatagtacctgtagtccttaattagtaattcagacttttcaattcacaggatagataggaccaaccggcaaactctcatcctagctagatggatgttcatagcctatacgaagatcctcaaaaagaagctaggcagattccctcaaaggcatgctaactgcaccctaggagagaaaacttaaccatgagctatcaaattgcagccaccatctagagggtatatacatgcacacatatagcatggactgagcttgggaagcaaaaactgaagcaaagcagaagaaagaataagcagacgacagttacatgtaccaacacacctcccattcgtcccccttttgttttgcgaaggagatagtagaagactttcctttctcttttcaacttcccataacgtactccctctccctttcccctttcccctttcccaatcttacaaatggaccaaaatgtactcccttgcaagctagctatcctcatcagcatcaatcaatccatctctattctctgaattccaaacccttccagtgcaaaacaaaaaccgaaatgcatgcgcctactctcttactacagatgattgctagttatatatcgacaatgcatatgcatctatatatctagccaaggccggctcatgtcctcccttttgctcccatcactctctgaacacacccacaccgtgcaggccagtagtcctagctagctacactacactacacttgatgacttgatcagtgaaaaggaaaaggggagagagagagagagagagagagagagagagagagagcatataggggagctgagatcaaaacagcacaagcgcacagccaagaacggaagcagctaagctagctagcagccgcagcacaacgacagccaacaagtgtacacctcctcactgtttgctactcccaaatcaacagtgatcgctcgtactcgccccataaattctcctagcgggacgtacaaggaagttatggccagtgagtgccactgcatatattgtggcaatattgccccctctttacagactgccacggccataaagatctcgtggactggtatactgttcgcgctcaaggcccagacaatccaaactatacgtaatctgtcccactgccatcagtaaattttccagtgtaccccgctaatcagcaacagaattatgcgtaatctggtccaccctgcatcacttaattcagtgtcccccgttaatcagcaacagaaaaatttaagacatggaaaactcaacaccgtactggatatgccagtagtatatatatcccccatatgctgctactagtagctagctcagtactacactctataccatgacgttacttatacagatatcatacatccatgatatatatacatgcagaagagagcgacagtactactgccactgtagcaggggaaaaagcggcggcaaagagggggaaaaatatatagaagaggaatgtacgttcacgacgactttcactgtaaatactgaaattatggtacagtgaatggaagagaattttgagatctaacctgcaattgttgctctctggagttgtttgttgtcgatcgatgcatggttattaacgcgccgtccaaacgttggggtcgagatcgatgcgatcgattggatacagcatatcgcacacatatgatgtgcaagcgaagtgaggcagccaggcactgcttgcttgcttgctttgtgttcgtccatggatatatgttcaaatcttggcagatgttaggagagattatataaagaattttgcagatgtatgttatcatatgtaggaaatgggcttgtgtttatggtaacaaatcattggacagaagtaatcgagcaagaatggaatgtaatagaacaaagcaaaggaagagctcaagctcatcacacggatttggggaaaactttcaagtttcctaataattctctatatcttctcaaaccaacagaaagattccaattaagtggccaacaaaacaaaaatgtcaaatcctaatgctgtcatcaaatttcaggttataatggaatcacaagagaaagtgagatcgatgttgctgcgagaagaagaacaaaccaaatcaaaacagaagaagaaaaaagaatcgttgatgaactttcctttgtttttctctctttaggtcgctacagatcgagatccaaggccgaatgcgcgtccctcttggaggaagacgacgacgacggagacgatgcagcggacgactcggcgccatggtggtggtgaggaggcaattccagcagccgcagtgttggatccctcctcatccacgcgggcgtctgcaatgacagtgcattgccatgattgctcgactcgccggcggcggcgccgccgccgccgccggcatgcgggttgtcgaggttcacgccgaacagccgcacgcgcttcgcggccgtcgtggggctctcgatgaccggaaccgagtcgagcaccaccggtgagcccgccgcccttacaccatcgccgctcggctgcagcgtgtagtggtggtgcagcggcgacggcgcgcgcgccagcagtggtgcttgcggaggaatcctcgccgagccgaacaggaggacctgcctccccatcgcggcggcggggttgaaggcgcggaagtcgaggccttgcctgaggcggtgctcgtagagcgtggccggcggcgagggctgcacgaagaatccccctccgccgccgatcccccacggggcgtagtgcgacgtgagcggcatcgggagcggcagcccgcggggcagccggagcgggtcgcgggtgtcggcgcggcgcttccagtcgatgaagaggcggtgccgcgccgcctcgtcgccgatgccgcgggagaaggagacggtgtccccggcgtcgaggcgcttctccttgacgaagcggctccaccccttggtcatcacgtagctctggctgctgttccagtaggagtagcggaaccgccatggcttccccgcgcggtcctcgaagttgagcaggaggcccttctcgttcgccgccgcgtccagcgggaagtacttctcggcgtactgcttcgggatcaccagccggttcagcttcccaacgtcgctcggcgtcaccaccttgtcgaacatgtgctccttctccaccacctccgcttctccgccgccgccgccgccgccgccgctcccagacgccccggcgccatcgtcggagcgaaagggagtgctgctccctgacgcagacgccgacgccgacgcggaagccgcgtgatgagcaggagacgacgacgacgacgtgggcgcaggcgcggcttcggccgtggccgtcatgaaggggatctctcgccttcccgcctcatcctgctcctcgtcctcctcttctttagaaaacctactgcttgtagtgaactccatagaaaactatcactatttcctcaaattcttggctgtatttcttgctcctctctcccaactcctccttcttcttcttccttcttcctcctctgcaagatgttcgaggataggcactgttacaaagaagtaagctataggatactagagagggggatatgatctacctatgtatgcgtgtatgtattgtattgttgttcctatgaattcctattgatctcgagctgtgtttggaggaagcaagccaagctctagctagggagagggagaagagcagagagaggaggaatcagagcggtttgcattgagtcttgtgcgcttctaagctatggggaattggggatatggtgggaagagagagagagaaagtgaccatggaattggatgtagatcggtggttcttactggttatactactgacactgtcatcgaatacgtcactccgtcattttctttctccattttttttgttcccaaatacaaggcattcataagttcaaatacttcgatgccattttcatccgtacaaatgatcccaggaaatgtctgcacgtgcatattttagtaagatattggaaactattttgatatgattattcctcgatgggttgtcctctcatttgcttaaaaaccatccaaatagttatgaaaaattctagaaaaatttgataaaaataaaaatttggcaaattaaggtcccttcaaaaataaaaatttttttgtggtacttaaagaaaggtgtcattcttactaaagataatttagctaggaggaattggcatggtgatttaaaatgcgctttctgtcatcagcctgagtcaattcaacacctgttttttgattgctatattgccaagttcttgtggcgagcggttcatattttgtttggtataagtaccccatcaaacttagttgagttattccaacagtggtctaaggggggtaataaaaaacaaaatactttactgttaactgcagcagcagcgcttttctggacagtttggttaacaagaaacgagttagtgtttgacaattacggaccgaaatcttttttgcaggtactattcaggggtacgcattggttacgccaatgggcgaagctgcaacggcatgaggatctgcgttcacagttgatcgcggcatcgcaacatcttgagtcatcagctttgcaattttttagttccaatggatggttatcagctagacacatcggtctttagtcgtctgaacttttatctcggttttgtttccaagtgttactctgtaagaacgtttgttataattggcatgagtctatcttttgatagatgaagccgggtataaaatatccattatctaaaaagaaaaatttgataacactcatgccacatatctatataacttaataaaattttaggtccaaactgatcaactcactagtcgagatataaaaaacaaattcaacgtatgaatagtgacatactgttcactatatatactttatattatcactttttgaaaaaaaatcgtaacacagtttgtatttaatttaaaagaaaaaggtatacaaagggatatcccttcgaaggattagaatccactctctcagatatttaaccaatattttctaatgatgagatttttttctagacaccacaactgtgtgtggtagcatttgtatttttatgacttaattattcgtcgctgatgtcgtggggtctaataaggagaggacaaaatgaaactactgttctagtttctttcgatctaaaatatagttaactttatatatatatatacactctctccatcctaaattatagggcgatctctttttaagaaaaattaaactcggtaacttttgactaataattatactaatcatatttatgctaagtattatgcatgctatattaatatatttatattttaaagtactttcatgtgatgctaatttcatatttgttagtaacataatatggaataaattaattgtcaaaatatgtcattgaagaccgtgtaaaaaaatatatggcttataatttaggacggaggaagtatgttattttcgaaacttaattgcgaagttgtacatttattttctttttctctctttgtgaaagaagatgtaggtgtagaggtggagaccggagaaagagctagaaaagtggggtgtactgtaccgtgtagtttcttagctttataaaggggttgagatggattgagggagagaggtggagcctatgaatttctctgagttgggctcatgtgagcttgtccttgtcaccatacgggtatcaaatatcacacgcctgcctatatagctgctaagctacccaaaggatatagcttgattgcgtagagtgtagacctggttcctaggttgggcctcctggtactcatcaaggggattttgtcatttatatatgttcatgtcttgaaaaagatttgtgataattgtatgatatgatgtggaatgagaagaccgcagtgtatatatgcctcaaaaaaaataaaacagctagcttgacttaattaattaatatgttcagcaatatatagtactgagtatgtatctatacgttcaagagaacttactagtataacctaaaatcaatatatattggaaaaagtccaaataccctcctaaactttagatggtagtccgtctaacaccctaaactttaaaaccgggcatccatcccctcgaactttgccataccatccatatatattacccctaatgtggttttggacgatggttttgtatatcttgaaagcttaaacaaacaattttaaataactaatataacatatttgcatatcatcagttataaataatcaatttatttttatatagtgatatcatactattattatggtggtactcgtttgtaagttggagctaataaggagcaaaaaagaaatatctaagtaaaaattttaatatatatgtccaaagtgtatggcatgtgattaaactcatccaacttatatacaaattagataaaaaccactatgcaaaaccatcttagggggttttacaaacggtgttgtaaagtttacggggctgaatgtccggtttcaaagttgatggtgctagatggactttcatccaaagtttagggcctttttttttgacttttgccatatatatttgcatattgatgtcatgaaaatctcaaagattttctacatgaagtatatgcaatattacccccaaacaataaggtcacttacataatatgtatgcaagctttgatgctcatatataaagttactatgatttccccaaatgcaagttccctagccattggatctcaacgtaagaactcaccgatgtctgacggtgcgacctgaacttcagaaagcatgccaaattgaggtctctagggttggaggggcgacgacgtacagatccaacgtcacaataagtgcactagagttgcaggaagacaagaggagcggagcaaaattattgagaaagcggagcaaaattttattatgacattaatctattaatggtttgcatatactctattttggaaagctttacacatgttatgttcaagcaaatactttagtctagatttctacaaaaaaaatgacgttttattttacataaaaactactccatttggtcaaaatatatatattttttgaaaattcttacaataaacataagttaattttgaacgttgttattatttttatgcaagttgtaggtatatgcaaatgacatagttaagttttatataaataagaaaaacattcatgatactccatgcatgtttataactattttttatttatgcaaaagaaataagtggtcaaaattgtatatcttataaacttctaaaagtataattaaaaaaacatcttttggggtataaccggaggaattatgttatatactggtctaaatgtcttgcatatccttcctattgcttaggttgcaatttattaatttccggataattggtgctaattaagctgtagcttggtcgttagtgcagcaaatataggtccacatcagttaattagtagtgggctgaaccatgcttatacgcgaatatttttcagcttcttgttccattcttattggccgactacaatttcccccttttcgtccaccatatgtatataaacaggttgaaatttccctaatggtagtcagtagtagtagaatttggttctcatttggccatctctctggtcaaaaactacctttaactgatccgtacgtataaggtgagcaggtttttctcagtagtcaccaagttgaagatctgctgctgatgactgatgtgatgaggcatctttccaaaccgacaaaaccctaacgatacacactagtgtggctagaaaggcaggtgcgttcccacttgtgcaatacgcgtgccttcgcatgtgtggagagacaaaagttgagggggaaatgggaggcagatcagcacaaggctagctaggagaagagagatcagtgagagagatggttggccgagttcaagatatctatatatcgatctagctagctcctggaccgcatatatgcagctctccccgaaactttaattattcgtagaatcgtagtatatcagtacaactgttcaacatgcctatcttattaagagttgagcagagcagagacagtggtagatatgtaacatgcttctcagatggttttgatttgatatgcatatgtcaagggagcatgtgactctctgggtgcccacttctctcactcttgctactacatggaatttaataatttgtggctaaggttagtatctaattatcaagaaaaggatctgtaggatcgaatcacaagaactaagccaaccagaggaggggtgaatggttggtatacccaaaaaccaaaaacttttagcggaaataaaagttaccctcgaaatcgacggagatcggtctgaccgagattgatctgtcggtctgaccgagtggatgccgccgatctgaccgatgtagaatgatcggtcgaactgccaaagtcgcctgccgctcgctgtcgccgccgccggtctgaccgccacaatgccatcggtctgaccgccggtgagttgccggttagaccgccgaaacccggtgaaacacaaatcgaagaactcttaaagtagataacaactttattgcttctctctgtgtttacaaagtgcaccaacagcactccttacaaaaatttcgactaaactcgaaaccctgactaaactagcaactcaattgctctcaaaagcgatacaaaaacgataccgggaagcctcacgctccccctctatttatacatgaggtaggcagcctaaagccacgaaccaaactcatactaagagtcctaaacaccttaggaaatcctctagtacaagatacaaactttacataaccaattgtaccaaatttggactccttccaaattcgactccgcatcccatacgcacacaatacctccatcgtatgccatatagaatcttcaccaaccacgtgcatcaactctagccttagtatcccgcatgatatctgaccaccacggacatcgtcttaccaccaagccgactcccggttcatcaccgcaaatactctcccgaggcatcgagtcacctacacatgaaacaaacaaagaaaccatattccgagaccaagctatcaccaacttgactcattgttagcaaacaacagtattacatacgtatagtatccatctagaagccataaccatgaaacaatcacggatatccaaagaaacaacccgaaaccgaaaccgacacagcgtcggccggtcagaccgcgggccggccggtctgaccgctagatcaccgccggtctgaccggcatacacagcccggtcagaccggtcacataaaataacagtgaatctgatcatcacctgaaaattgattatctccaaaaccacttcgacgataatctccaaatatcaaaaccaataatcacagatgccaattgttcatcacagaataaaaatcaaaacacacattgatcttacatgatcttcacgtgccttagtctgacatcatttgtgtaagcaaacacttgttttcagctggctctgttgaagggaaaaacattaaacaaagccaacacgtgttattcctattatatcggtcaatgatatacctatcttatcttgttagagtttcacatgagggtttgaaagcatccgcgttcaagtactacctctgtcccaatatatatagcaatctattatcggatgagatatatcatagtacaacgaatctggatatatctcatgttcagattcatagaactaggatatgtcttattcagtatcacgttgttatattttgggttgaaaagagtagaaattactattcaacaatactaagtttattatgtaaaaccaagtaaaaattaaaaaagggagtgtgtccatctttctcttgaaaactagctaaatcttagtcactattagctctaaattcagtcatcctcctcgtccctatataacccacaatcctatggtcaaatcctgatgtttcccgttactattagctctaattaaattcattgtcagtttgtcacccccgccccataacatacgctggctgaccaccacagtatgtgtgatgtctactaggcttcccacagagctgatgcattgcccatgtggaatgccatcgcactttttcatcctcttagctgtcttagctttcaccttgtaccatttggattaatttggtctccagtctcattttaatttagggtgtactattggtgaggtggtggacatccactagttcaaattttgttgtccacaaatattgttgtgtttatctttagttgtaaccaagagactagtatttacattgcttaaaaaaaatcccaggtgcacacgaacccctgaagattaactttgctttaattctgactccaacttccaccgcgccatctaccatattacccaaatgggatgatgttgaaatgagaacgtatcacaaacgagataacattgaaagccaacaaaaaattagtgacttttttctgggtcattaattgctgaatattctagcatataaaagaaattattatataccaagaaaacatgaattaattacatagaaataatgttaatatattttaagtatgcgacacgatcaacaacattttttttcttgtcaacattgtctattaaagtttgtgtcaaatatgtgtacgtgatcagttacagtttaggacttggagttgtactaggtataggaatagagtaagaatcggactctatcctggaaactctcttaaatagagggacatatctgttgtaaccgtaagacgacaatagcataggtgtgtgggtacgactagccgacgacctagcaggtggagggtcgtggatacctggatacactgtaatatgctagatcggggagaggagcgcccgtaattagtgtcctggagatgtaggcctcgactgaactccgttattaaatatcatgtctcggtatcatcattatgtttagatgttctatgacgttttctttcacgatttggtttccgatgtgatttcggggccggttttataacattatcacgcatatcctgtgttctagactagtaacagttaagactgcccttgcccagcaatcagatacattaattaattacggtttacacttgccaagagcccaactgatattaataatgtgcttatgcagtacatgtaagacaaaattttcgtcctatctatcatgcttcgtaatagtagcagccttaatttattggtaccccatacaatttaggaaactatacgagtgctctggctatggatctagacctagtacgcagttcctgtacaccttaattggcatgtatgtgtactgtagcccatgtaatctggtacatagtttttatgatttatttcagccgtcagccggcagccggtcctactctgtcaggttaagtctgataagatcctaacacgatgctgacctgccggctttgtttgcctgtcaccgccatggatatctcaatagtcctataaagataatgtagttcaaaaaaagaagggagaaacaaatatatctctggcgcttggaatcaaaacgactgaagaagtacttcaggtttttcagtgcctggcaagtactccagaataaatcaaacagagcaaattgtaactataaccttcgcgcagcagatatatgttttttataaatccaatttcatcctataacctgttttaatcaagaggtagtactactttgtttttttaaaacaaaaaggcaatccagggctgaaaaaaaaacatgcatcgccatggacacgaactgaagaaagaacagcaggcgactgtctcggttgtagttaatcattattgcctctgcataatattcccggccgcttaaattagcaagtgaacttgagcatctagctgacaaggcgcttatatatatatggtcccaggagcatgcgagctccaacgtaccaaaaatggaggggcaacgactctgactgaatgcatggccagtctggttagatgatgatctagattaaaaggtgtatacaagtgtcgtctctttaacaacaaccatagcagctagaagcagatgattattaaatggtgatcatgtggcttgcttttgtaacgataaaaaccatagcagtactggctgtaacctctttacatagcaggcggcacgtccatttcgtttttccgtcgtcagtgggtgtgcaatctcttgcattgacctgcacggtctaccacagcttcgatcgatcgatggtttgatgagatgtttagctagtgaaattggctttggcagatgccgctacctttgtaattctttattattattattctttgaacattttctaataacattttgaaaagaaataatcatcatgtaacttatacggaaaagaagcgagcaactttcggtgtcggcttatatatgtagtttttgcaataggcacacgcacgtgaccgctatttgcatcatgccttattggtttgggacgaaaccaagcgagacatgtaatagatgaatgaagcaactacaacccagttggaaggtcaaaatctgtaattttgaagttgcaaaacctaacttcgaagttagatcgagtactgttatagccatttgggctgtgttcgagatatggtggtttattaatatataattaattaaatattagctaaaaataacttgaaaatatattaatatgaattttaaagcaacttttgtgtagaaaattttattaaaaatataccgtttagcagttttaaaagtgtgtacgtataaaacgagagtggtgtgttgaaaagtgaagaaagaattcagccttagttgatactcccggatgtgtgaacttttgataactcctccttaaacgtatgtgtgaacttttgattactcctccttaaatgtgataatgggggcgtggtaagggtttggacatgccataataaccttgtgaaagggatgaaaacgatgttgcggtagtaaactggtgtcatcgtggctggtactgtagctaaaaggtctatttttttaagaaaaaacaatatgatggatttattacaaaattctggaaattcgaatccttgtcttgtttgagtgttcgctgctagttttaatcaaagagaacgtctaattttaaatactaacatattcaatgtaacagcgaaagatggtactaaaaaattcggcgtaacattttataagaaagcaaaaggctgacaaaaattgtacgaaatttacactatagtagtagctatctagagtggggataacaggcgaggattcgaatcccatgaagttaatggaggtaaagtgcagttctgcacatacattaaatccagcatcaagtggtccgagaatttcttcagaaagaattctgcatcatgcactcaacaaagtcctatgtacccctatgttcgaatcaggaagagaaaacggcgctaattaacatgatatatatgtacgatttgcttaaacacaggtagagggggaaacaaattaaatacgaaacagtgccaggacagggagaggaacggcacaacacaactgtactaacacaaattagtgtgttcaagggtattgcagcactattgtgttttttggctgccacaaattaacttccctactgtacctgtagatctgagatgtttggtttagattaactatggctaaaacgcactgaagacacacaccgtactgttcatttcggcttttgctcatgcaacgacagaggatatgtttccctccatgcatggctccataatagagtactgtaggggaccgaaccaagaaaacaaaaacagagcactatctgttcgcattgccataatccatgtaaagttgttcgataatcagactagaaacagttgtcgcatattttataaaaacgacaaaattatatatatgatactaaaaaagttaagtatatatactagttaccgacctgtatatgtgtggactatgatatattatatttaaccaaatgctggctatttttaaattatactagttggctaaaccaaaagtaaattaagtccatatatacatagttaaaacttgctaactattagtttgaatttcaaaaccaaattataaaggactaaactgagtttccactatgggtataactatatttctgttaactctgaaacttttagaattattagatattagaaaaactaaaaatatgtagtctttaatatcttcaatggcatgcttttatttaatatcgatccatgatacatatgaattacttaaattagtagccagatctttctacttaacatgagaacttacattgagcttataattaacgctgtggcagatagatcaacatgcttgattctcttgatgagtactccctccgtcaaaaaaaacctaatctagttgggaatgacagtacctaactaggttaattagggtttttttttatagtgaaaataactacttgtattattttcatctggccaacgagtgcatatagatattttaacatataataggcgaatagttaatcgcagttttgtctccgtcgcacgaaactaaatcgaggtcttatttttttaaaatagaaaatttactatattgactggagatttgattgaaattttgaacgaaaccaaatgttgggagctgggacaagcatagtccccacaattaaatcaaatcaacactcatcctggtgatgagttaaactggggcatttatacacagggacctagctatggcaaaggatataaccataggccgctcttgatgcgcactaaaccgctggcagagattcttctctatatgctcaactatcccctgcatatgtatatatttttgcagtacaagctagggttcttttaggctgtacttccctggtaataaaaactctaagctggctaaacagtccaggtaaacggcgacgatgctcataaattgtgtcatatatacgcgtcgttcaaaggtgagtttctggaccacacacactagctactgcaggatactatgcacggtttcgttaataacagtgccacagctacagggacgaacgatcgtcagggcagattaaaggagcacaggtggtgataattcaaacacttgctgccatgcatgcatgatcccgtaagctagctagcgtggaatagtaaaaggggaatggatcattagagcacagagttaggtctctgaacactgcagaaacttaatgctggttgggcctgaacccccaaaatattccaaagtcgctgttgcgtttcaccatcgcctccaagctagtagtaacaatcacacaagaacagcagtccacttgtctatagcgatatccatctagggatgactatgcacagtatataaacatgtatatatattgtgctacacaacctaacacatgcgtatcgatcgatctgtacgcatgcatatgcatctcaccttggaaattaattagtaccattattttcaaagccctgctactctacagcaatagaatgcacacatgagatacagcataacagcaagatcagtagtaggacgcatggatgcaacatatgcatggatcaagagccctttttctggttttctccttagcgtcaaactgtcaatcaagctgaaatggagcgcgtgcgcgtgcgtgaatgcatggcatggcacgcactctcacacggaacaaattctttgcctttgtgcagcggcccgcgcgcgcgcgcgcacacacacactactacaccaaagcacgctgcatgcatgcagcatgcataaaatggatgcatggtcgagtatcatttgaactttttgcatgggcaaatctcaagcttacacgtcttttgcagtagggaacacatgactttaaagggcccaaattttgctgcctggctgcccggccagcctttgctccaagtaccaccactactactacaacaacaatacaacaaccaagtctcatgttgacgcacacatacacgctgctggcctcactacccaccagccagagagtgaggaaaagactgttttgtgtgtgtgagatcgagagagagagagagagagagatagctggccggccgggtgtggtccagggaagaagaggtgtcagtgacagtgagctagctagctgggggtgatggtgcatggcatggcactgctcacattcatgtcgacacacacagatcgatgcatgcacgcgactatgttctgatcaaccggggagtaccacctttcagccccaaaatcaacggtgatacttcagtcctacagtagctagcacccaaccacgtacatactgattgatggctccatgcacacacacacactagacactactatagctgatcgatcgagacgtataggtgtgtgtaccgtgtatcggtgtatgtgtaggagtagctcgatgtgcatggcgagtagtatgtgtaatttgccgcgtccggccgtatgaccgtatatcgcttgtttggttggcaccgtacgtacgtacaagtacgtcgcatggagttagtgttatggatacggacgtacactgtacgattatctcatgttgtgtcgctgcaagtacgtaccatggggttgatatatacctggcgatacgctggtgtagcgtacaccgttacatctgtacaagcatgcagctactagcttctagctagctcgatctcacatttactggcgccatgaatgtggtagtcgtagtagtagtaagaacagcagcagctgcaggggtacatggccatctcacacagatctgcagaggcttctaattccacacctgacacatgcatcatgatgttcaatcttttccctctccccactgttggccggtagaggccgaagacctgcaactgaaagcaattaagcgagcacacctagagagagagagtgtgagagagagagaggagcatgcatgggcattgtcattgggacgcagtggcagaaaggaaagataaaactgatggagaggccaaagagatgggcagccttttgctatcgtagaacatgcaaaacaaaaggccccttctttttcagagagcggcagaaggaaggcaggcagggcaggggggggggggggggcgcttcgctttccatttccacgcagcccaaaagaggtctcggtttcttctcatctcatcgatctcggtttctccctagctcgatcatcagctgccccatgcttcctctccctctctaccggtcgagtagcttcttgttgcattgcgtgatgctacctgcaaactgcattgcgctatctcccctggcatattcatatcgctcgtaacgtagatcagctggcattaatttgcacaaatgcagtactactacatgcatgggatcaccggccggcacaagtcattgcagtaactactggcacatgggactgtacatgtgcccgcagcatatatgcatgatttgatttttcaaaaagatgcacgagtacgtgctcgcctaaacgatcgcgactctaattcatggcattgtacagatcgagcgcgctcgacatatgtaagataaatacaagttatgcactgcaatcgccatgagctagtagtgtagttctgaactccctgatcttatatcgcctaatataagtttataaccctcatctcgatctctctacgtccgtacatcgcaaagtgtatattgattaatgaactgccaggcacgcaggtttcgaggggttatgtaacgacacgctagctgcaatacagtacaggtacatactccatcagctcacatacaggtagtacgagatggcatgcatgcgggagttagcggcgtcgctagctggactggccggctagccacctctctcttagcagcaacagagcaacaggctagtcgcgcagtgagcactcactgagctccgcatggcacctgctactctgctagctgagctgccgctactcctccaagctgcatcatgcgggcggaggcccacgcctccgcgacccaagtaagacacgcacatgatcgacatgccgcgcgctgggccacgcatctctctccaccccatctctaccggcgactaggtacgtactactgttcaactgtatgccacgccgtcgtcgctctgaggctgagactctctctctctctctctctctctctctgatctatctctcactccaaacagtgcctgcttgacgactccggccaacagacaggcctggctggggtacatggggcatgcagggcattcatgcttccaagccatctcgttaatgcgaggcctatggactttaaccagcccatcactggactcgattggtggtccaaactcctcctcctcctcattatcagcatcccctcgattatttggttccatatcgtttgctaagaattttttttttcggaatggttaggtggccggaaggacttttttgggttgtttgaaacatgcataccttgatgatttcaattagcatgatcctcaaaaataatgttcctgtaataattaatcatctcttgatttttcagtaaagaaaaatcacgttgaatatgtggttcagattttggattgtggtgtcggatatggattatgtaagatctctctagtttgctgtttcatgttacgggggaaacaaatttggtgtggtgagggagttgtaggcatcagagttgaaatccttgtgcatctataaatgatacaggaaatgaatgttatatattttcactgccttaaataaagtttcctacgatgactccaacacattcaccaccttatatatgtagtgcactagtacaaaaaaatgtttttgcatgcatgcggtcagaatcgatcttcacaagggcctaggcggcccgcctgtacgtaggtgtctacagaattcaatattttcacgtgcgggcgatccaacagcttgcgaaaatctattatcgatcgtaggcggttgcctctcatttttcacagattgtcagatgttgtgttttttttcacagattatttcactttagagtttgcctctcgtttttatctacaaatttagtcgctaaatttcacataaccgaaaaatcacatgatcaaagttgaaataagttttattcgcaaaataaagttgaagtaacaataagtttgattgtatgttttcaaaagcattgattgaatggatatatggccagggtgaaatagatcgatcagtatatggcctgtaagggtgcgttcgttctgggggattgggtgagaaaggtacatagtattccgcacgcacgcttcccaaactactaaacggtgtattttttgtaaaaattttctatagaaaagttgctttaaaaatcatattaatccatttttgaaatttaaaatagttaatacttaattaattatacgctaatggctcacctcgttttacgtatcttcccaatcttctcgatccccctctcctcaaactcaccctaagtcaagctcatatataatcctttgggtcccacacgcagccttgcatgcatgcttagtgaccacggtattacgcctgccgcagcctgcagctagccaacctgcacctccggacttacttggcgcatgtgagtagaaccatccaaccagaagccaacaagctgcattaagggccgggtaaggcacgcgcgcagcgcgctcaatcttgcacggcaagggaaggatcagacgagagagacgacagctgagagagacgcgtacgtgttggtcgttgagggcgagagaatcagagaaagcaaacggatccggtataatacggtctgtgctttgtgtagcatcacaactggattgagagaaagaggacggacgacgcataaagccaccgatcgatcttgccgtctttggggcccccggcctctctctatcatatatatgatgtacactagaaaaatatccgtacgttacaacaggtgaaggttattttaattttattattgttatatacgttttagtttaggtgaaatctactgtgagaactcgtttgaatatatattttatccaacttcctttcgtgttgatttggtgtttttcatcatctgaatttgaaaatttagagttctaatttgggaacttttgaaatggaggtttcatatttggctcgtgggtttgattgcttgtggttgtcagccttgcgtggtttacacaggatacggaagacgcatgctcgacgcgaggtggtggaatcggacagcacgagcgcgtgcgacgatggaccaaaaaaaatctacggaagccaaatttaaattcagtttaatttatttattactacatccatactaatcaaaatataaaaagttttatagttggacacaagtattaagaaaacttgtgaaattaaataggaacaaattctaaaggctaaaattattaaattttgagacagagaaaataccaaatagcatactctatggccaatcacaattagaagattatgggctgatacgttacttgggctgaggcccaggcaggcattgaggacgtcagccccttcgctgtccgtctcgcctgcaatacctgtctaatctttttttttcttctcactaataaacgaaacggctaaacagaataaacgaaaccgcaaaacagaaacagaattggattagaaagacgtacgaaaatttgtggcaaaaatatctttaatttttataataggtaaagatatgggatgctatacacagatcgcggtcgatcgatagtgagggtgcaaatcgtgcatactacgccgtattatcgcatgatagtgtgtatgtatgctgcatgcataggctgtaggggtgggcattcggtctaaccgaaaatttcggtctcgatcttcggtctttcgattttttcggtctttgaaaagggaaaatcgaatttcagcgcaaaaaatgttaagaccgacaaattcggtctcggtcctgaccgaaattcaacaacattttcatatatgcaaagaaataatagaaattttcaacataaaaatcacaaaaaaaaaatcgtaagcacttatgagtaaagactcttattagcttgcatgcctagaagaagtatggatgtgaaaaaatagagtttaatcctattaaacatagtatattgtaggttgcatttagacattttttttataattcggtcttttcggtctattcggttacccgaggaaattaaccgaattgaccgaacaaaattcgttttttcgttacgtatgactgaattgatgaccaaatttttcggtctcggtttttttgtttggttttttttgcccacccctaataggctgggagctaggctcgctggagcatgcatgcctcgatgtgccctggcccctcatgatcaccatccgtttcctctctctctctctcgcgcgcgcgcgatccatccaccgtcctgctctcgaaccgccgtctcgtcacgtcgctttcgcgcggcgcgctttccccacccacctcttgtctctctctcgcgcgcgcgcgagagcgcaccggtacaccaccaccaccaccaccacgtcgtccacccgatcggccgcatgtgcttccgtgggaggcggcagcagacgtgcgcgcggagagaggatgtgtacatcatcccgcggcccgtgaggccgtgacaaggacggccaatcgccagatcgaatgaagcaagggcgcgcgccggctaggcgcgcgtggaaggggaatatccacatgcacgccggccggtgtggcccccggcccgggcgcgacccctgccttgccggcaagataccgatccatccacgacaccgaatgcgcgcgcgcgagatggacgaatcaaaaaggggaattatggagtagcgctgcatgcacactagctgatctactgtagattcacctactacgtacagtatatattccaaatagagcaaagacatggttgagcccatcgcaaataatattgatgatcatgatgatgttgagaaagtacaactatacagagacgagctgccaaacaccaaccaaaaagcgcattccgttacaaactatcattaagtaacatgacttttttttcagctatcacattttcggcctctaaaatgcggcacaaagccaataagttctttaactgaataacagtacgtgatcaagggataaaccccaactaccctaacaaagaaaatcgatcgataaattaaacttaaagaaccatatagattctaagaaataagcctacaaatattgtggcatccataatgaaataaaaaatcctttatctaccgactcgaatagtgtagcaccattgcgtataatatcatgcttcccgatgtcataacattataaactaatattatgcttcccgatgtcataacattataaactgataacaatccggcaggcctaataacttaaggttgcttggaccccaacagttcttatgcacacccacccggggaagggctcaatctccctaaaagactagtccaataggggaagggtggctctcccttttaagatagcttcctcctcccaagttaagcaaggtggggggaaaaagactagtccaataggggaagggtggctctcccttttaaggtagcttctccctaaaagactagtccaataggggaagggtggctctcccttttaagatagcttcctcctcccccttttaagatagcttcctcctcccaagttaagcaaggtggggaaaaagactagtccaataggggaagggtggctctcccttttaaggtagcttccttctcccaagttaagtaaggtgggattattcagaggctcacacggtcgccgcccgacttttgcgtttttgccaacgggtaatagtgtaggatgaacttatcattcccacccccttaacaagggcccagctctgataccaaatgataaacaatccggcccaggtggggttggccgaggtccaacaaattaaggttgcccggaccccaacagttcttaggcccacccactcggggaaaggtccaatctccctaaaagacgagtccaataggggaagggtggctctcccttttaagatggcttcctcctcccaagctaagcaaggtgggattattctgaggctcacacggtcgccgctcgacttttgcgtttttgccagcgggtaatagtgaaggatgtcctcatcataaaccaatattggagccagctagaaaatatgaagataacttgtatactatatatagctatagttctatcaaaactagttggccgaatagatttccgtcaaattaaatagtgtaaaactaataagtccattggaagtaaaattgtaattgtaacagggtagctcgtgaatttgctcaatttgctaaatggacatctcattgcgcggtttggcatgatcatgctccgccttatgttaagcaagtgttagagcatgcaagattgtaatattattacataaccagtaattagctctcatttccctcaaaacaattattgtttatctctatatagaaatacacctacatttatatgcatatacaaaggtggtatcacttaaagaatatcatcctataataattgagacaacaagacctcttaaccattaatgtaaaaaacattttttattagctttgtttttttatcccatgcaacaaaaattcttttaataaatgctaggagtaagagttaactttgagccgttgtcaatgatatttctcttatctccgttctctatttttcacgtcactcgatttacttgcatggcaacgtgtacatgttcataataacgatcgatcaatctgcgaccatatcaattcatcgtgatttaattaatggctttaatctatcatattcttttattggtagaaatttccagaccatcacagaacaaaagtagtggaggcatgcacctatccttttttaaataagacaaatagattgattgatagactacatatcatttgctttatctatctgttctctttcattctcaagtagaggagttatgacggtgcaccagcacgccttgccgacacacacaaactgacgtagagaagcatgaagtggaataatgtaggcggtgttgcaagggcccagggttaacctggcatataccaattgccatttgtgagtaatagtgtggtgacaacattacaatgataagaacaatgcatgcatatgccttggggggggggatcgtcaattcggtgaattcttatgggctatggccctcatgggagactccacagataaacaaacactcttacaaatattgaattttacgtgtaaatcctttaaactaaataaacacaaacgaccccactaaaatataaagtaacaataatcgatcccacagtatataaatttttgctttgctactatttcagaatacgacaacgtcaaggagagcaagggtgaattcatcttattgtgaacatgatccgtcagaattcatcatagtgatcgagatgcaaatagctagtgtattggtaaggagtgtgtgtggtatcaacccaagattctatgtttacttttttaacacacatattatttcttctacttatttaataatcaagtcccttcttggtagtcctcctcgatctctctctctttcacagaattcatggaaagggtcgtatattttttcgcgcttttccgttgcttgaccaacgataaaaagttgctacgtggagccgtgaccaaccgtgagttctttcttaccctttcagaacacctctccgttcacaaatttatgtatttatagactataaagattaagaatgaaggggaaatgaacggaaagagtactactacttaaattgggagtgccttaggttgcattcatcaaattaattattaactagtaataggaatatattatattcatttggggggtgcatttggtttagaagaagttgcagtctgcagattgggtgtagacatcagcatagaccttgctacagtgtctttcagagtttcagttggctactctacctgagctgtcgaacagggtttctgacgttcatgtggagtatggttatgattcgcaatataatgtgctacagcattacagcaatacggcatgcatgccttaaaaaaagtatagtactacggcatcatgcattagacaaagacaagacctcgtgtttgagtgattcatatcgattggatggtttaaaaatctactacgaaatggatataaaattcttaaacctattggttgtggccagtccagcgtggaggctccctgcgcatatgcatgcatgctagtaaaatttgtctattgattgatctggacgttacagtaattttatccacagtttgaaccttacacagcttatttattctttatatattccgatggaacgagctcaaatgaactagtacttttcttgttcaacagagagagatcgaaagagagaaactaggatgaaccaggctgaaaaaaaaaacctaatccgcacttctttattttgggactaatggaccttacgtcatcgtgcgatgccagatgaaagagagaaagtcaatctttagtccctcgactatcactcgaatctaatccacataccttaattaacgataaaactgggtgtatcgtccccttcaactatcaaaactggcttattttacctttccgagtgattttgaaggtggttttatccggtgtgacggttacatggcattaggtcagtgtttttatctgatgattttgatctacttgcgctagcacacggtgcttatgctgcataaaaaataaaatcactactgccaccttatccctccctctcctcatctctctctctctcccgctgtcacattgggaacagtgtggcccaacgcgcgacgcgacagacaatagcacaacgacagtggcaacgccgagcaaatccaagtgattaggaaagtgcttgggaaaacaatggcggagaggtggtaggaagaaggacatgggatgggaaaaagccaaggtcagaggcgaacctagcctttttgtcgtgagaagcccgatagcagtgagagtatgaaacttggaggccgcgatgatgacaagggcctcggagagctatgcttggatgaggggcgatgcggtaaggaggagctatacgtagtcaaagagtgggaactgggaagtggtggttagcgtcgtcactgtagagggagggcttgggccaatgacgccggaggaaattcttaatatggacaagttgtggcatgaggaggggcaatggcgagcagttctagcaagaagccttagaagcacacggtgaatactaggctctgatcagtggcgagatgtacggtggcgttgggggagagctacttagcgaaccattccaccaaagtatcgagcatctttagcgccacctccattcctaccaccaaggttgatagaaggcaactgcattttgattgaaccaaggagatggggagaggagttagagtgccattaagagagagagagagagaggaatggtgaagaggatgagaggtagtcacttacatgtgtcccccatttcaaccttttcatttcttgaagagagaatagctaatgtttcgctggatctggcagaccagctgtcggcaggcgttgcttcacatttgtggtcagtgtaactcacggactcacgagaacggatagttcgtcacttgcaaaagaaataactcaagcctattaggtttttcttctaatcttctttcgactagtataaaaaagggatgggaaaacaacacagcacggttgtaattaacaaaaagtcatacagtaccatacaggcagctgctgctccgtaaccggttgcccctggggcctggcacatgagtacttctgtagttctgttcgctgatgccggccgggcggctgctactgtagtgcgctgtgctcgaccgcatccgcgcatgtccgtcgaccgtcgttcgccttcttcgcggtgcactcagaattaaccaagcaaaattcctccgccgcaataccgaacccgcgagccagtcggctgccgaaccgaccgtctcttgcgccggtgaaatcctatcccaagtcccacacgctgacacgcgcgcctcatcagcgagatggttcggtctcgttggtttgggagatgcaacggttggcggacgaggaattcgggacgttgggcttaaggctacaatgggcaacaaaaattaggaataatttcaccggaggtccctcaacttaacaatgagatttttttaacatccctttaaccataaaagcagaaatgtctacccctaaactcactcaaaccgttcaaagaaggtcccatgataacacatatgggtagtttcgctgatgtggcatcctagtcagaaaaaaataaaaaaataaatatgtggggcccacatgtaagtgagaaaaaaaatgtgggtttaaccattctaatcagcaatctcctactcttttcctttttctctttagttttatctttgcagcagaggggggggggggggggaggcggcggtgcacggcccgaggcaggcggagtggccgtgtcggcggcgggcgagcggcgcctccgggctcaagaggtgcagaagggcttgggacacggggtcgcaggggggcgagcggcggctccaggctcgggaggagcatcatcggcggtaagcagcgggcaagcagcggctctgggcgcgggaggagcagaggggcgggaaacacggcgggcaggcggtggctacgggcgcgggaggagcaatggggcgggggacgaggcgggcgagcgacagggggcggagcggagcagcggcggtgacaaggggtgtgtggggtggttttttttggcgtcatcggcgcagcagagcacccgcgcctccgccgcatcggccgtcggccgccacgcgctcgcccgcctgctccagccgctctccgctgccgccaccccgctccactccgcctccgtcgccgctctgctccgcttcgccagatgcgttccgctttgccggccgcgcgctcaccgcctcgctgcttcggacgcgcgcttgcccgacgccgttgccacccgctccactccggtggtcgccgcgcgctcgcccacctgctccggccgctctcggtttccgctacccgctccacaccgccgccgctgtcgccgctccgccaaccgcgctctctcgccgctgccgttccactttgccggccatgctctcgccgccgcgctgctccggacgcacactcccccgccatcgccgccacccggctccactctagcggtcgccgcgcgctcgcccgcctgttccagccgctcatggccgcccgctgtcgctccccctctatggcaaagataagaacgaaaagaggagagaggaaagaaaagagaaaagaggagaagatttagaaaaagaagatatgcgggtcccatatttttttttccttttcacttacatgtgggctccataacttttttattttttattttgttgactagaatgccacgtcagcgaaaccaaccatatatactgccatgggacaaactttgaatggtttgagtaagtttaggggtatacctttctggttttgtagttaaaggactaaaaaaatctcgtggttaagttgggggacctctggtgaacttattcccaaaaattaagcccagtcaatagtccaaagttccagtcagttaggttgggccgtctgcgcaattgctagcagaaactgagtaaactgggccgtgtaatctgtatgtccattcaaaatcaggcccactatatgttctataccgcagcaagacaatggtaagcgagtagcgacaggaaacgaccactcacgaaccaaaatctcctccactactggacattatccagccgaacattatccctggctactggctagattcttcattcttgatttgtgaataacacatcatcatcctgaacctgcagcatccgtgtctcggtgatagaatggctgcctggatggatggctagctcttcccccaacatgtcacacagccgatcagttcctgcatcgatcccgaatatgatgccaaaagcaaaaaccgtccttcagcattagcatcccccctgcaacatgctcgtgagcacggcatgtgttttgatgtcaacttaccacggcatccgtccgctagcgctagtatttatacgcctagttagtctccgcgatcttctccgatatatcgtgcacatccatatccacgcgcacacgcagccggctggaaggaagaaaaaatgctgcggttctggaggacgcagaggagcgtcacgtcgtcagacgccttgtctgtgagtaaaacatgtaaatgcaccgtcagaaggagatggagtactatacattttccatatgcatttctgagtgctgtttgtgtatgtgtgcctaagatcgtggagatgaacgtccacatggactgcgagggctgcgagaagcgcgtgaggaaggccatgtcccggctcgaaggtgccagtactgtttcgtgtgtgtaaagtatactccagtacgtgtgtgtttcgtgtgtaaaatgcgtgcgtgcgtgcaggcgtgagcacggtggagatcgacatggacacgcagaaggtgacggtgacggggtacgtggaccggcgggaggtgctccgggcggcgcggcggacggggagggcggcggagttctggccgtggccgtacgacggcgagtactacccgttcgcgatccagtacctggaggacgacacctacatggcgacgcacaagtactacgtccacggctacaacgccccggtgatcggctcctaccccaaccacgccttcacccacatcgtcgacgaccacgccctcgccttcttccacgacgacaacgtccacgcctgctccatcatgtgacctaaaatataatcttatttaaaatcctacatgccagcgacagatacatatctgaccaaatcgaacaagctaagtgacctaattagtggtgcaaaataagagatgaaaaaccaaatctaacttcgtcgatcatctagtaatggtcaagtagttgctcagcaatccaacgtgcaaagagtgtggtgatatgatagacaaattaacgaataggaattaaggtcgaactaagcttatcaatcgacaagttgttcttaattaattgcactatgcgaccctttttcttatgaacatgaattaaaaggaagggagcagtagaactggattgctaattaacccgctatccttttgaattgactattcgacgggcatctgcatggtatcgatgcttgctgttgacagcacaaggggaagaaaagggtggccctgaaaattttcaactgttgatgctagctagcggctgatctcgctgaggtatctgtgccagtaatttttgtctgcggataggacaacatggagaggatgactaggaaaaggagcactgttcaaactatccaaatgtctccaaccaaaagtgatgacccatccttgcatatgtgcgcatcagtgcatatgttcttatgctggtgtggggtgaagattctggtgtgaggggcaaacggtgacaacggaaaagaaggttcgaatataccctgttccctgattacaaatacagttatgagttctgaccattggattgtatacatatgacaaaaagagagtaaacttcagttcacacatcagaccaaattgagtacaggtgctaccagtatttggctttcgaagatattttacattgggacagcgagaggagtaagttcagttcacacatcagaccaagtttgatgcagctgctcaatgctctgtttgttcgttttgtcagggaatatgggctaacagtgacccaatctggattggattcctatcaataaataaacaaataaatctggattggattgtggaaatgataagaacacgcgtgcaatttgatccactttttatgcgatcaatttgggaggaaatgctctttcgtttcgctctcacaaacctgtgaacaatttccaccctctgaactttcagcattgttcttgtattccccacttcctgaagttcttaattctgtcaccaaacgacttggcatgcagaacaattcagtccctcacgagatacagaacaagaagatatattatcttataccccatgggccaggtaggtacaccagcaacaatgcaaatgccgtcgcatcgcatctcagatacttatgcccactaagcttgaccattatgttaacttggattaggggtaggctagagattgattggggcttatatgataacactacatatacacataaaccacaaaatcaagctatcaacattcctcatctcgttgatgccgacttatatctgccctgatagcgcctaattaacccgtgaacaacgtgtcttttcatcgtccaagtgcccaaccaacacatgacaaaagcaaaacgagtaaataaatttatttagctgccaataaacaaaggaaactggacctgcccgtgtcgaatcaaatgctaataactcgaatctggaacaaaattaacgccaaaaacaacacaaaaaacgactctttttttttctccaaactcgactcggctttgagagttctaatcttagccaggctccaccccaacctgtgctgccctgttcgagcgaagaacgaaagcgacacgagccgtccatataaatccacgccgtcgccgccgaatctcgcgaaaaagctcgcaaatttctactcggggaagaagaagagccctctccaaaggatctcctcgcccggccggcggcgatggcggccgcggcgccgatgccggttgccggagcggggtggtgggatctcgtgaacggctcgacggcgtggcaggacgggatcttcctctccctcgccgctctctacggcctcgtcgccgcatcctccttcgtaagcatctcgccgcagtgctcatctcctcctcctcctcctcctgagtcctcctgactgatactatactctagttatgcttatgcgaaagcactgggggaaagattctttcagaattttgtgtcaagatggattaaggggtaaaaggaataacaatacacgtactccaactgggttggtgacttgagttcatggcaggagaataaagacttgatttttggtgcttgtttgatgggaataccgcagatttgcgatatcaccatcagcgagtttaattgggaataaagacggttttgtattagctttgtgctttgagcataccagtgttttgcatctgaaacttgtaaaagctgataatgaggacgaatattttacagaactttagatcaatcaatatgaaaaacctgcgatttgaaatagagatagctggacaaggacttgtgattatctgccatgcttatctttctgatatccggaaatcctgctggatgcctggatagacagtacaaaggacaataatgtgtatttatgccttggtatctgaataatgagtagttactacattagtgtgggaagtatgaactgcagatccagttcctatgcttacagatatggtgcacatgtgaatgctcgctgttaaatgattaaatttacttgaggaagacaaggcatacttaattacttatcatgtgatatgcagatccaagttgttaggatacagtacagagttcctgaatatggatggacaacacaaaaggtctttcaattacttaatttcattgtgaatggaggtatttgttcaatttcacttgtagtacaagttacatgctcaactccctttgtgcttttgagtttaatgtgatttcaatctgcagcgaggtgttctatctttgcagtccgccgccaagtccaacaagtgaaccctgaggtctggacatctttgctattttctgtcttgtaattgttatgtttcacccaattggccagagttatattcttcattcatttttattccagatctttcagcatgttattcttgatcttccggggcttgcattcttcacaacgtatgcaatgttggcacttttctgggctgagatatcttatcaagcacgtggtctagagactgaagggcttagatcaggtttctacactattaatggtgtaatatatgtgatacaggtaaagcaagttatctctaaaagtctgtattgattagtgattgctatttatcagattttgtataattccgttagcattgcaataatcaatagtacaccctattgcacaagttgcggtgatcagatattttctttggaactgtgaatttcaagaaatttgttatagaccatgaaaagctgtgatgcgcttatccatttttccctgaaaagaaaagatatactgttgctagtatgcactgatgtgaaacaatgagatactggatgaaagtagaagggaataactttagctgttattgtgccacttatcttgtgatggttcagtgcttgcttagtataaaacttccgctaggctgcgtatctcaaaatactcactcaagtttatttcttcaggttctgctgtgggcgttgttgtggcacaatccaaacccatctatgatagtcctttcgaagttgttcattgcaggcctatccttttctgcagccttgggttttctgctatatggagggaggtaggactaagagtattactgaatgactcttaaccaagtttcatcaatcatagacagccaaattggctggctagactagctgcaaactatgtaaccttgaaccatttagtctactaataacttatacgtagaacagtatttcaagaaaatgtccacttattcagtgcttcatctagcatttgacattaacattcatttgccctgttttgattggcaggcttttcttcatgctgaagcgttttcctattgagtcaaaagggaggcagaaaaaactgagggaagttgggagagttgccactatatgcttcctttgtttcttggcacgatgcattatggtaaggttttcagttctctgatccttggatgagtttttgagtttcagtgttccatttcttacttgagcggttttgacactgcccaatttgttttgcagatgtgctttgatgcatttgacaaaaaagctgaccttgatgtgcttgaccatccaattcttaatttcatctattacctggtacgcatgaatcctgcgaccatattgtttacctcagtgaaatcaactttttttccccgttatcagttctagctagaaattgatttccattatcaataccagctaaatatattctgtacttgttcttatcccctgtttggctgtacttgcagatcgttgaaattcttccttcatctcttgtcctgtttattctgaggagaatcccttcgaagctacggctcgcccagtatcatcccctcaacagtggctaggggatgaaaacggatgaaaacatgaaagctaaaaatatggagaggcctgcaaagtgacacggctgcaagcccaggacatgaaaaaaaaggatgacccatggtctaaaatctctaacccttgttcaaaatgtgtatagatagggatctgaaatctgaagttttcccacaaccttcacctcctgtagctaaccttggtggttcaaggtgctgatgatttcgtgtaaccaattgttcctttgtaacaatggaagcaagtgtcctcgctcttttgagcgagcaagccaatgtttgtcttgaaaaattcttgggtaatccattggtaattgcttactactgataatatccgctttgctaattgctagcacaactcgaatgtgctggatcaaatggtaatccagacatccagtatcaacgaaatttttgaagttttgcagagtagcagcgtgatgcagaggtttctaccaactccgcttcgtcagaagcgaacgccgccacctaccaaacgcatgaatcatacgaaatttcaaaattgaagtcttgaccctaccaaactccgccattcttctgttctggtctgcaaatatttttttctctttttttttttcgataactactcgaggcttggaaatctccgagccgcgagcaaaccctagccgccgccatggccttcctcgccgctgcctcgacccgcgcgccgttcgccgtcgcggcgtcctcctcccggcgccgcaccgtcctcgccgcggccgtcaaggccaccggcggctccaacccggccgccccgcaccccgtcctctcctccctccgcctcgccgcctccgccgccgtcatcctcgccgccacctccccggcggccatcgcgtgcaccccggcaccgccccctcctcccccggaggtaaccgtcgcggcctcgcccgacgatcccgtcaccgacgacccccaccccttcgagaagctaatcgtcgagaccgccgcgctcgccagcttcggcggcgcggaggccgcgcgggcccgcctctccgccgccgccgccgccgccgccggagtcgtcggcggccgcgagcaatacgcccgcctcctcgccgcgcaggagctcttcgtggacggcaaggtggacgacgcgatcgccgccttcgaggagctcgcccgggaggaccccggcgactaccgccccgtgttctgccaatgcgtgctctactccgttctgggcagggccgccgagtcggaatcgatgctccggcgctgccgcgagctcgccggcgaagaatccgtcgccgatttcgtaatgccggtctcgccgttgccggtcgattcgtcggaggcggaagcggagccggattcgccggaggcagagacggagaagctgtgaccggaatggccggtgtcacggttggaataaaggtattcacttgactcgcgatacaaatgtagggagatattaaatggcgatgatttgataatttttcatgcaattttagatttcaaatactacatgattttacatgtcctccaaataaaatgaagcgatcatgagaatttgatcgtattgataaaacagtttccacgatgatcgcattgcttagaattgagtcatttgcaggaatatcttatttattcctcaatcctgatggtggttaatccaccgtcgcagtgaaatttgttggaatcgaccgatcaactaagctcatcttcactctttgctcgtctctggactctggtagctgatctaagaacgtatacaatcaacatgtatcgcagcgacaaatgatcatcgtttcagcactagcaggttaggcagagcagccacaaatttcaagacaacgttgttttacgctgtaggactccatgctaatgccagtgctcaatgctgatacccggtcacattatttgtccccattctgagcgaacacggtgaaatcatgtattgctgctgtctgtgttgatgttgagggaagttatctgtggatcacgtaatgcggctgctagtaacagaaatatctcctagatagcattgttggcctgctggggtaatgacttccaactgatgaatgtacaaatggcatgtaaaatgacggcaaactagccctcgtgctctctaccaggaaaagagagttgtctcttcctacttcccatgggattgtcttgtgctgcatagctatccaggcggtctcaactcttctgcttgctataggaccagatgagttctttctttttgccaaccaaattcaggacgagttgggctgttggagtttggccggagcaaaacacgttacgagattgttgccatgaggtgcaaggtggtctaacgtgcaagcatgtttgcagtcagcaacgtacaatttttcatttttttttcttcagcttttgatgtgtgcttaatctccttctattaatataacgccaagcaacctgtttggccctttgaaaaaaaaaaaaacacactgacgagacaacgactcaataaccatccctggtagttagaaactcgacttgctttgctggtaaaaggagcattcaacataaaaaagacaaccatttattatgccattcaaatacttcttatcttgattttgaaacatcagttgcatcaccaaacataaataaaaacacaatatttggttttcccgggcttcaccgtggtcaaagaaataacttggcccatgttagcaatcccgagcaacgttttggccgatcgagcaagttgccatggcaacgaagccatgcatgcaacacaagatgcagagaaagaaaaccagacgaaaataaagttgctaatgcatctgcataagcatgacacacttgaggacttgaacaattgacccacgacctcgatcaatcaatactggcggtggcggatcagcgacatccgggagcctcgcagcttctcctccacgacgtcgtcgagcctccgcgccatctccggcgacatgtgctccttccagtctccgacctcacccttcctgaagaaggccgagttcttgaacgacgaccaggtagccccgtgctcgccgtctcgatttgcctccacgtttctcatcctttccatactgcagagctccacgatagtttcggggacgccaccggcaagctcctcgccggtgaacgggcagccgaggaagccggcgagccgcctcacgctccccacgccgtcctccttgaggctctcgtaccggaggaacacgacctcctccggccgcgccaggctctccttccagtactcggcggcgtggtcccacataggcccgtacggcgagacgccgtcgcagagcagctcgaaggcctcgtcgaacggcgtcatggtggatccctctggtttgatctcgtcgaggtaatgccggagcgagacgaacgcgtccttggggtcgcggcacaggtagacgacgcggcacccggacgccttgaccgacgcgggcaggctcgagagcggttcgtgcactgccaggatgcgcggcgacggcatggcatcgaggcgatggcctggcgcgacgcggcagctgcggctgatctcgtagatggagtgcaggaatggcacgaggtcgtgcgggctggagtggaggagcgggtgctgcccggcggccggcgcgtggcggccgcggtgcacgacgcagaaggcgagcgccttgagccacgtcgagccggacttgggcatggtggcgaggatgacgtcgctggggcgggccacgaacgtgtcccgcgcggccagcgtcgccggcatcaggtgcgccgggtaccagaatccgccgtacctgcggtacggggcgctcccgagaccatggcaagacggtagggaggacgcgagcgcctcgtacttggcgagggcgttgcaccagccttccccgtcgccggcgctcatgtcgtcgcctgcgcctgcgcgcggcgagagcaggtgctcggtcactccggcggtggccatggcattcctgggtcttggaggaccaacgcctctatctatagatggccatgcatgccaatctgtatttactactccctccatcctaaaatatttgacgccgttgaccttttttaaaaatatttgaccgttcgtcttattaaaaaaatttaagtaattattaattcttttcctatcatttgatttattgttaaatatacttttatatatacatatagttttacatatttcacaaaagtttttgaataagacgaacggtcaaatatgtttaaaaaagtcaatggtgtcaaacatttagggaagtaggaagtacaaaatagtactccatccattccaaattgatctacatatttcataggtacatcaagactaagaaaaactaataattctctcatactatatttactctagcaacaaacttaatacatgcatcatccccactatttcctagccaatagcaaatcaatatattgcatgtgggttataaatacatgtgtgcatggatgcatgcatcaatgtctatttactccaatgcagaaataacgaatagacctaataaatgaacacaaatatgcagatcaatttgaaacggatggagtaattaactgggggtgcagaacttgtgcgtgttaaaaaattattgcaagatacacatcaaaaggtacgattatcaatctttttgcactaatgcgccatcgcctatttgactcttccagtctaccgacacttgttaataactagtgccaaatctctacttgcctctccaaatctgcatacaaaataaaacaggtgccaagcctaatatactactctttgtacgactgattgaatcatttccaatgccacggccacgccagcatgaggtttttttttagccatagtgtagtattttactagactagaaccaatctgatgagggtacaagatgtttgctgatcgacttgcacaaaagttggtgcctcttgtccgcctaaaccaagttgcaaattctgaccatacttttcaaattatttctatccagctagcagagtttctacttcgaaattctaacgcatggagagagtaagatacttcgcaaatcatggatagaatcatagagagccatgcctttcatcatatcaatatctcatcagaacttcagtacatatggttgagaactatattggatacatgcatatagctactagtatatatatgctttagttgaaagattccacatccgggagcagttcgatgacacaccggcgagtagaggatggattctaatctctcgggtggacgtccacccgtttcttacatgtcacctaaatgattatgaaaaaaatcaaaaaaaaattacaaggtaggttaatatataatatatcacttcacaaacatgtaagttcaaatttgacttttacgagtctatttcgccttcagtagtctatttcgccttggatttctggaaagagtaacggcggttagttactgtaaggaacggttactgctcaagcctcaaggccttagccaaacacagaattcagaaaggcgttaagctagctttctttcgcattaactaattaatttcactgcccaaatatgctgcatgatatgaaagagcacggaagaggacacgatcaaatggtaaagaaaataaatgtttaaaatgtcaggtttaaacgtaccccaaatcgcgagccgctaagacgcagggagtccatctcgagcaggtcgtcgacttcgtccagctcgatgacggccctaattatcgcattgttgagttctttatcctcgctcgcgttaaagaggcagcctctgttctttgcatcagccactatctcacgccaaatggtctttgctactcgctagagtatttgcattgccaagaatccaaagacagtgcctgcaaaaacaaaaacaacaatggatcaaacaacaaaatcggagtgaaatcaactctctgtgcgactgacgtaattggccgggaggatcgaggcaacctacttggcccgggtcagcgcgacgttggtgcggttgacgttggagaggaacccgaccgatccggtggtgttgctgcgcacggcggagaagatgatgatgtcctcctcggcgccctggaacccgtccacggatcgcaccttcacggtgaagcccccgtgcgtctcgtacgccttcccgagcctctcctggatggcgcggacctgccccttgtacggcgacaccacgcccacgcacagcttcctcccggtgtcaaccgactctgcacaaaccaagctatctgagctcagcgatgccatgccagaatgcaagggcatgatgcaatgtgtacctttgaacaatctctgaacgatccgggtcacggcggcgacctcgatggggttcatgaggctcttgtcgtgcttgcccttgctctccttgccggcatcgacgttgatgaaggagtaggagccgtacattggcccggcaaggggcttcctctcgtagtccctgtgtaatacgttctcgccgtcagatatcttgttctcgtagaagcttgagaccgggaacttgctgatccctgggtgcatcctgtactgcacatccaggaggtgcttcgggtgtcccagcgaactcagcctctcaaacaggctccttccaaactcagcatcttcacaaacctgtgaagaaacaaacagacaattgttacatagcatagtaatagagattgtgaatgttctactaatagagatggtgagagcttaccctgcttttgacaagtgccggcagctgaaattcatagccgatgagaacggcgtgacgaacgccagggagctggagaggtatcagtgactcgcactccttcagctgtgctgcctcgtcgacgacaaggagatcaaacgggcttgcttctggcaggtagtgcagacgggatgagctagaagctgtgcagagtatgcttttggcgttccggactaggaaatcttctatcgaacgcttgtcgaaaacgttcggaagttcaaagtgatcagataggtgttttagcttctgaagacactgagctctagcatccttcagctctgtactcacactatcttgcacatatgtcacgaagttctgaaacagtgagctgatgctgccatcggggctgagtttgaacagggttttcaggctctgttctgatttgggctccacaagtttaccaaaaaattttagcatgtgcagggcctgggtcatgtaactgaaattctctgcagttgtagctgacctggggagataatcacagaaagtcttgacacaaacattaagatcattctcaagccgtttgtaattacttatgaagtattccttgaactaggaagatagcccgcgcattcgcgcgggcatgtattgtgggctgcatgtttcaaaaacttataagaacataatattaaccgaatagcactgtcacacttcgaagtatgttttctccacaaatattattcgttggtatttgttattttccacaaacgtgttatctaacaacttaaaagtgtttcacattgttgtaatgtaagcaacatgttgttaatcatatggtttaaaaatctttgtggcttttcctaaatatttatggctgaccaatagctagtctccaaaatatgctctaaagtaatttatttcttttacttgttaaatatagttaatttggatttcgactcatgaaagtttactgcaaataatctaatgaggtgcactaataaaaaaatagtttagatggtatagttgtttaaaaatttctatcacgaaatatgttttctatctaactaataagcatgaaaatagggcaatgggagagaaggaaaagaggaggcgaggttgtgctcgtgcatgaggggggagggcgcagacatgcacatgtacggacataacataataggacagctagacaggagggatgggattgggccttttctctttttgtctatctattaagataaatctaatggtaaaaaaataatgagaccatggtaaaaggcatatttcatataaattatgagtatatgtgattttttttaattatttcatattttattaagtcaatttagatgacatgtaaaaaaagtagggatgttgtctcttgacaaaacactatttaatagtcgagtttctaatttttgtttgacattgtagttttaatttacatatgaatgtttctagaataatgtggatgagaggaatggggaggaaggggaaaagatgtttttttatttaaaagtttaatagagatagatttaatgttaaaaataataggtttatcgatttaaatagaaatcattgattaaatgtttcttccgcagtatttgtagtactttttataatttattagatgtgccatgtgatgagctagaaacactataaaggatgtataatggaccattattatataatggatagatctgtatgatattttatggggatctgcttaatgaatctttataatataataagcattatatagtaattatttatatactaagctgctagctagaaaatatggataataaagtgagtaaggagagagggtagatcatttacaatggcatgatatgtattagtatttagttatcatataaaggatatgagtttatatccaaatggtctatttcttatatgtatatacacaccaacacatggcataattgaaatcaaatatattataagaaattataattatttaatattaatattttaatataaaaaatttgctacctataaataaatggagaaaaaagagagaaggtgggggacgtacgtacgtggtttttttttacaagcgtacgtacatagtttggtgtatgtacgtgatggagcggatacgaatgggttttgagattttttttccttgatataagatggatctaatggtgtgaaacgatgggtccaccatgttaagttgtagcgcccgtttcgtcgtggcgcctagtgggaaaactatctcttaaaaatcctaaatgcgaaaattttctccttgtttgttgtccagtgtccgtgccattccagatctcaattccccaatccattgtcgaaatccaaaccctaatctcaaatccgtcccaaatcaaatcctctcgaaaagtctattttgcctccctcgagttcgtgggccaatctcttctccccggcccatttcctcctcagcccaactctcctctcccctccatccttgcccgcacatgtgaggcacgtgcgccgctcgggcgctgagcgagagagagactctctctctctctttcacttctccctccctctctgctctcgttgccacttcccgccgatgccgctcaaatcgccgcgccacccgttgcttcccgcgcgcgcgcgccaaggtggccgaccggcaagtcgccgccgccatcagcgcctgctgcgcctgagcccgcgtctgccgccctgtagccgcgcccttccaaaccgccccaccgtcatcgccgtcgtcatcgacccggccccgctactccgcgcgctagcttccaagggatggaggcagagctcctcctcctgcctcgtcgccctctctccctccttcttttcccaaagaagcaaggggcaagccccctttcttccttcctttttcccttttctcttccaccaccggcgtcatcctccctgtcgctgttttggccgctagccgggacgccagctcgctggcttgaccgcccaaggtcggttttcgaaccgacataaccgcccaataaacccgagcccctcccctaaacccatctccctcgctttcgccttccgccattgtcgcctcgccccgtgccctgttcgtcgtcgcccttcgctgtcgcgtgcgccggaggagccggtgcgcgctaggatcggaaggggactccgggcactcgtcttcttcctcttccccggcccgaggccggagagatcactcccgtgccgtcggcctctcgtcacagcgccccgtctcgtctcggtagaacacctccctgttctccctcctcgctcttcctcctccccttagactcgagcagtagcttgtgtagcctccccgtagctagcctgcgtcgccccgaccgctgccgccgctcgcagtaggctcaccgccgtcaccgccgtgctcggtagtagccgcctgtcgccggccttcctcggcgatgttccgtccaatccgacgctagaaacggattcccggagtcgcgtagatgctctagctcgcccgaatcgatctcccgtcacgccatcgctgatttccccctttctcgccgccggttgctgccgccgcaatccgccgccgtcgagccccctccggcgaatccgagccgttggctcgctccctctcttttccccttgtcattctagtgtacacctcgtcgccctcgtcgtcgcacagcgtcccggagaaaccgtcgcctcccgccgtccattcgcggccggcgccttcgtctttctcccgccggcccgcgtggcagccacgaaggcgccacatcggcgctagctcggccggaacgggtcaagccgaccccggtcagccgctccctccgtccccgctcgcgtgcgcgcggcccacggagagctgagaggctgcgcgtgggccacttgcgcgccgcgtccaccgcaagccacacgcgtgcaccgcacccaccccaaccctagcgccgcgccacatgcacctcactcacggtgagccgagccgccgacaagcgagtcccactcgggaccacgcgaggtggacccggcccaccggttcccctccctctctccccgtgcgtgcctttgggccgccttctcgagcccgccggcccattagctcggccgagccgcgccccttctctcgggccgcaccctagccgcccgagggaagtctgttcctcctccctctttcttttctttttcaaagggtttaattaaatccgtattcctttagaccaaaaatccaataatcttagaaattcaatatcttctcaaccgtacatccgtttgactccgctcaacttccaaaaatcctcaaatctcgagatctacccaatggcacgcttagaggtcaataatagggctttaatttcgctgtttgttgagtcgtctcgttcgcgtgtagcttccgagctcgaagacccagagtgcgcggatttcgaggatcaagcttaagatctcgagcaaggcaagtcacctttgatcatcttgcacctataatttaaatctaagtatttcttttccgcaaataatacatggataggattaacacaagaaatttggccgcggcttgcgagatagcctaccggcccccatcctaattgctgcaattagcctccttgaattattgaacacttaaacctcctttgtcgactgttgtacttcgatgtacgggccttcgggcacgcacgtcggagtcctcccctcaaatttaaaatatccaacgatgggtaaaacttgggttttacaaaagacttggaaaaacccgacgcctgggtcgatgcttgcgaactaaatgaatttccaaaaatcgcagaccgggggacgtgccgggagcacggtttcctgctcttgcacttaaggaccgattcctttggaatttcatctgaacatataacaagtacgaccacatgggtggaatgggacacccctggctgagtaattagctaatcaggggagccttgatgccgggagacaagtggattcgccagggtggtgtcggggaggacccctgggcttcctggcatagtatggtctaggacctaacctgttgttggtctgggacccctctcgtcggcatatggtaaacctgtgtcggctctcgaaatgccttgtcatgaaagccttaaggtcaccagacgtggctgttctccatgggctgggtgatccgggttagtaatgtcgtgtgggtaaagtgtgccccctctgcagaggttattaaactgttcgaacagccgtgcccacggtcatgggccgatgtaaggtgattccttagtgtagttttgttcgactagtgcttggtgaaattgctgttgggaatttgggttcgatgtttggaacatctgtagctgacgggatcagctaggcccgggtggccatttgaaagttgtggccgggtgccaatcttgaatcaatcaaagactgatacattgcacatactctgaccggacgagatgtactgtctcatccgtgtcgtttgagaagcactcacttagttgttttaaaaatgagtttaactaaaaatcaattgtaaaaacaacagcctttcctttgaagccttcattaaacacataattcccatgacttgctaagtactcctgtattcacccttgctctatataaataatccccccagtggctgaagaagatgagatggaccccgctgacgaggagttcttcaggagcaagtcggctatgatgagttttggggtttcgatctggttcccaagtcgcgcctgtgatgttaggttcaagtcttggcttctgctttcctcttttgtaatgcagttgtgagctcggggtctgtccgcagcccaacatgactgtactcctactctataataaagagacctctgttgctgtgatattctgtcttcctgtgataccagctctatttcctgggattggtatcggttaacaggttaatttggagcgtcacaggctggttccgttcggggctagttcggggcgtgacataagtgaaaactgatggttggatttttattttttcctcataatttctataatttgttagagtgccacatgacgatataggagtgttcgtaggagccacatggcggtttaggagcgtttgtaggaagtttaatggacttttagtatataatagatagatggcattattggtatgaccttaggaacatcctcctttacctgctttttatcattctccttgttcttgtttttgttccttttcttctcagcaagatcctcttctatctccctttcaatttgctccacatatgaatcatactgaaccagaggttgctcaagaatccgtatcatggagctcagactgtgcacccaccctgaacctggactcaggcacttctgcagtcggcgagcgcgcttctccaagaagatctttgtcaggtttccgtccacgttcatccgatcctcatttccgaacagcacaacatcactcaaaaaacaggcttttccactgccagcagaaggatcctcgaggagattgaggacccgagatgcgacctcgacgacggcggtgttcgtcggagcgcaggtcagtgtcctgtggttcttgaccagcattgcccacaggagcgtgctgatggtcttcgtcttccctgtcccgggaggaccccagatcaggcgcacggaagagctccgctgctgcatcgctgacacacagtctagtactgccaccttttgcgacttgttgagcttgaaatcttcaaggccaccaagtgctctgtccggtagatgtaaaggcagttctgaagaatatgaacattcttggccgacctgccgtaagaattaaagaacatgcataagcaccaaattgcatgcaatggagcagatatattacatggtaatgcatacctttggattgcaatttactatcatccgaatgatgtcagtgttcctgacactagcaaccaccgcatccagttcactccatatgcgattgtacgtcgtcatgttgatcaggaacaccgcgaagagagacgattccaatccaaactgctgctcaacatgcttacttgacagcctgacgacggtgttgccttcagcatcctcggctttgagcaccgaggcaatcaccaagggcttctcaccgcgtcccaggtcagagatgtgcctcggtttccgatccgtcagcaacagtgtatccgcctcctttggggcgtaaacttcctgaaaaatgtccttgggatcagctttattggcgaaaaaactgtatatgagctgctcgtctgagcaaagcttaatcctggtcacttcagctgctggcgcatgcttgatgccttccagtgcagagcagagatcagcacgagtctcttcgatcagcggcacggtgaatgatcccatgtactctttcagcgaggagaaaattgtgggtattttcttaacctgcatcaaggcaagatcatccgcgagataatactcagattacagcgagagaacaagctggataatgcgatgtacgctaccattacagtggaagagattgtgtgcaaactgcagttcatgggataaatagttattccctccatttcatattacaggtcatgcaatctttttaagttgagtaaattttacaaaactacacgttttgtagtccaagttgcagaaaaccacaaacattttgacacttggcacttaagtacatatattttgatagtgtagtttcacaaaaccacactatcaatgaatagattcacccgtgagatgacgtgactgtttcatataggacgaggacatgtcatcctattaacagccatcgcacgaaattaataggatgccacgtcttcatcctaaatggaacgaccatttcatctcacgggtgaatccattcatcgatagtgtggttttgtgaaactaaactaccaaaatatatgtacttaaatgccaagtgtcaaaatgtttgtggttttctgcaacttgaaccataaaacatgtagttttgtgaaatttattcttttaagtttgatcaaacttatactacctccaacacaaaacatatatactaataaaatatatttaatgttgtatttaatgaaactaatttgatgtaaaagatgttaaatttttatataaatttgatcaaacctaaaaaggtttacttataataagaaacggaggaagtaacaatctactgcttggttacctttttcttgagtaagtctttgttgagcacatctttgagggaccaagagaacatctgcttctccaactcgctctgcgaccacgaactgtacctgccatcttttgcccttgcggatctcgtccccgccccctgctgcaccagcacgacgtcgtcgtcgtcgctgtcgtagtagtagctcatcgctaccagcacgacgtcgtcgtccgtccggcgagcgaaaacgtttctggctccggttggaagctttgcaagtgtaggtgatgatctgattctactttctaggctgcagcaatgcgtcgaggatttgtagaggcacaagaccggtgggattccgtctgcgaattaatgtttgagttggggtgtgtagggtcgatccacccttccgtctctcagtgtgagtgtgtgacccatcgttctgagaagagaagcgcatgcggttgcattcgctagtgaaaaggtgagagggtgtttggtttactaggagcccaacaagtgaaatgcaatttactgattgttcaactgatcgtctgagggttgtttttctttatctattataaaagtttaagatgtttttactagaattttggtacgtcatctgtgtttaaaacggttttagttttatgtttcggtttaatctatatctctacgacaagaaatttccgacttctgtaaaaaagaaagaaaaagaagtccgactcaaaaaaaggtaaataaagaaagaaaagaaagtccaacttaacgagcgattttaaaaagaagcttacatcgtcacttaactagcgattaaaaaaaaagcttccgtcgtcgtcagtaaaaaaaaacatctcttgactatgtagaaaaaggaaaaaaaatctcccagtaaaaaacaaaaatgttcgtttggtttttttggcaccgatatttttttccttttttctttgcacgcaaaagagttttttatatgcacacattaaggtttttggtttttttttcctttttttaatccgatctattcaccgcgcgcctctcgggtactcttagtttttttggtcaatcttttttatcgccggtttttttctcccatgcgctagctttttgtttttctcatccggttttataatctcatctgttcaccgcacgccttccgaggtgaaccctagcgctacgccaccgccatatcgattgtatgttttctcctccaatttgattgaaaaatcgattcctcactcctctcatcattttctccatgattttccctttgattcggctttaattgtcggatttaatcactgttctacaggtgccgatgatgacggcgatcttccttggtcatttttatccgagttttacgctttgatttttgggtaaaaagagtagatcgagtggattaaaaaccctcgaccaattttggtttaccaagaaagattcggctggatttgattgggagatttgctctagcaaacgtgtgtgcacaggattatcttcgagaggttgaagatggtaatcacatttgaaagttgaagatggtagggtcggaaaccggtagcaaatacagaaacattaaattataaaaacatatatttaactttacataagtatgttatatgtatacataaattcaaacttatactatataaattataaattaactccattttagtcatgcacaaaagttagagatttgattgaagagtcaatcaatatgtaagctatgggtcaagtagagacatgccctataaatatcgacatatttagaatacggtaattaccatattacaagaaacgataatttccacaagaatacggtaaatacggaaatgatcagtataacagcaaaaccatttctgttttcatttccatattttttaccatttccatttttgtttcggtcgattaccatttccatatggctcggccggtagaaagtcgaaaacgaacgccggtcggccgggaattaccgttaccgttttcacccctaatgtaaggtcatgtaaaggctgtgttcgattgtggggttcccaacccctctcccgcagcacacaaaacgaagcggaagtttagcgtataattaattaaatattagctaatgatctataaaataaattaatatttctatagaatattttataaaaaaaatacatcgtgtagcagtttgaaaaatgtacgcgtgaaaaacaagtaactaaagttggaattcaccaaagaacacagagctagagactaaccaagcactatcatattcccaaattttaatagcatagtaggtggatctaggaaggataaatttgtcttttcctaactcagagcttcagatctatttttgaatttggaactctacgatacaggccctaattcactcatatgtcttgcacttcacattgactttttcacaaagagttaggacctcatcttttcacttatgcttatacttatgagccaaaacttgaattttccaactttaaaattgaagctgatttaaggttttttcatcgaagtttatttttcagcttttacttttagatcactaagaacacatatataaaaattttattcacaaactacttttcatttgcaaatatgccgtttctcttaaaatctacgaataagcgaaatgatgggaccgttaattttctcgttctgtgtgtgtttggtgtcctcaatgtcagcctctcacctttactattctctccgtttcaggttataagacgttttgactttaatcaaagtcaaactgttttaagtttgaccaagtttgtagaaaaaagtagtaacattttcaacccaagataaatttattatgaaaatatattcaattattgatttgatgaaactaatttagtgttatatattactatatttatctataaacttggtttaacttgaaattgactttaaccaaattcaaaacgtcttataatggggtatattatatggcaatgctatagggtggctaaaagctaaaagtttcaaattttatttttctacacacatggcttatgataaattaatggctgttgtttaaacttaattgctcatttggaacgtaggatttgaaaattgtagcaataagaaaattataggattagaataccacgtatggacaaatcctgcaggaattgaaaatataggaatctagcacatatcacgtttggacggttcacaagaatataacgctaggtatctaatggaattaagagagaaaaatagataaagagagaagaacaagcattggacttcttaaaggaaaaaaaaggtttgagctcttggtaaaatttcctatagaattagtgcataggatggtaatccatatgaaactgatatactaaaaaattctgtttcaaacaaaacatatagaaaaaagttcctaagatttaaaatcatttgaatttccttcaatccaaagttgactaaaaacttttaaagaccaaagtatgtcttaaaaatatcaattgcggatgtcagtgtaggatctgccatggagatcgtaaggttccaagcactagtaccgatattgcaaccatatgagcaatcattgagtctccattaattttttctgtcatatactatctctattataaaatatagcaacctctaaaaatacgaatctggacatgaagatttgtagtctaggataggtcttatcccatcgtttaagttgctacattctagaacgaagggaatatctattagaagggggctatagttttgtatagtttgtcggtccgtcttatcctatatacctatacaagtcatccccactaagtgcaattaaaactaattttttgttctgagagtaagccacgtcaccttgattcattccagccatcggattgcacataaacgtttggatagcaatcaatcaatcaactggggatagcaatcaaaataaacatttagcaacaactaattaaagaggcccacctagccatctcttaatttcgaaacatacagttggaataccaacagcaacacatgtagtagcccagcagttataagctctttaatcttccattgaagttattttatctcctgtaaccggtgaatcagatgaacagtcggtcttcatgcctttatatactctctataattcactgggactttgttctcgattgatcatctgtgcttggcagtctttccatgcatctagttgatttatttgcccactcctctgctcatgctgatgcttcaacagatcaacatgcacaatccgctttggtcatctctctcttgcttgcttgctcatggatttatttttctttttcttactaatatcatttgttgtttagttgtagaatctgaagagaagaaaagaagtagtagtttcaaatatttcttaactttctgttctttgtgaaggttgcagatcttatagagagaattgaagggttggtgcattactatattcacataccggttgaaataataagaacaatttttttttcagttggttaaaataaataagaatacctttttgtttcagtaggttattgacatcttcgactgaacttttgaaagtttctacttcattaaaactatagtttggaataagcaattacatagcatctttgtgtaatcacgatgacgtatattgtctaccatttttctgtcttgctacatagcatagaacaatctatgttagttttttttttgtaataatagaacaatctatgttagtaccattcaatttattgcatctgtgttcaattggccttagttctagtaaaaggaattggcctttcactagacaatcagcgtattctgttatgattcaaatttcagttgcttattattataacattggtgaagtgttcagtgtataacaatacaatcattcatacctaattttttatctttatattactcttgtatttccgcagcaacgcgcggggtgtcatctagttagatattcttggatccgctcgtaactgcgtttgaattgatgatggaagtttcaaagtactagtgttatggatcagatcattaacatgtattaacccatattggtacactcgtgcacacacgatgggccctgtcttaaactatgcgaccaggatgtatcaagacaagcagttagcttaaccactaagcttagctttgaactcatcgatggcgatgagaacttcaagtcttcggtcgtcaagtcacactcaagagtctcacgttatacgacagaaaacacgctttcaaacatggaaaacctccatctcccctcgggcactcgaaacacaccaaaaactcccaaattccccctacttcaaacgcgtcgatacccaaagagagaaaaataaagaggggaaattcaaaacctcccccaaaaccctcgccccaccgccgccgcccccgccgccatggacagggcaccgccgcgcggcgccccgcgcgacgccgtcggccagcggtggctcgccgtcttcgtcttccaggccgcgctctcagccgcggcctccgcgctctacctcgccgcgtccccgcgccgccgccacgcccgcctcggcgtgccccggggcctcctcctcgcgctccacccgttcctctccctggccgccacggggctcctcgcgctcgccttcctcgtctccgcgtcgccccacccgcgcgctccccccgtgccgcgccgcgccctcgcggcgtccctcctcgccgccgccggggcgctctgcgtgggcgccgccgcgtcgctggtacccgaggactccgggtgggcggctgttgctgggatggagttccgcggcgctgtgttgggagccgtgttcgccgcgcactatttcgggcgtcggaggtggttgctccagttccccgttgtgcaggtcagtgaagtggggaaaagtagggttctcatctagaatggcgttccgaatcttatcaaattgccaaatggctgtagctcctaatagaggtattgcgactatagagatcggaattttaggtttaaagttagcttgttacgattttagattacctacttaggtatgattgatggtgctggtgattttttgttattgaatctaagcatggatgtttttgataactgtggcttgtattattggtatgttgggtctaagattctttgtgatttgttccgagtttaactggttcccacttcccactagagagcttcatgaattgatcaaatgattagggaatagctgctagcacctctgtaatattcaggttgatatacattggacatacatgtgctattctcagatgagaaatttgattatcatgtttgataagacactatagcgctgttttataattctccagaatatacgatattcagaatccacatgcatgagctgtagtttgctttgatagttattgatagagaagtttttatccatctagatcttttttggggagacatggtttatattgatctaaattatatgtgcaattctctgatatctatagctctgtttggttaatttttttgcccttgcgattttttaggcttgcatgttgtttacttgcaatccttcagcacttcccaccaattttgccaattgtcttacttgctttcttaatttgttttttgtccagcgacctccgttctatggtttgaaaatggggcttctgccatctggaaaaagggctctgaaggtgtcacttcaggccttcttcctttcctttatcttgattttcgttcttcctcagcaattcagaatcagaggatccattggaagccaaattatcgcccaaatcggtatttttataatgagcactgccgttgccttctgttgggaaataagtcatcattttgtccaggtttgttcttcacaatccaacttcaaaggaaaaaagatgttatatgatgtacttgttgtattgcctggaatgcggagattgacgtcatttcctgaaactttatagttcataaccataattcaactgctttcaacaaatttcaggttgtgcatacaagaaggtgcagtttcgctccaccacagagcactgctgctgcagagactaatcctactgagtatatcctagaaacattggaactgagtgatccaagatcactaatgcagtatcttgcataccaagatttgtgtgctgtatctgaatgtaacttagaaccatggcgtcgagcggccttctttgaggaatctggtgagacttacaaaagaattgtgacagcttgtttgaagccgcttgaggagttcacgtcaaaaattgctgaagctcttgaagggttttctagtgagaaaccagaattgttgtcacaacagttcaaacttgctgctgcatttaatgattcacaggtaagttactcatcagtttcttctatctgttttacctcttatgttgtgttcggctgttttcctgtttttttttccaaattgttaatcatgtttgcatttgtgttgatatagaacatgaaatggttcctttgtttaggagttaagaccaaaaacagttggatcttactgtagaatcagttcggtgtttactgtttgttttttgctttgtcactcatgacagattatctagagttgaattaaatgtacgtactataatcttaactgcaccacattggttagtgatacacatacataatgactagatctgcatccaggaagatctgcttgtaaaggttagtatcatagtttgaagtgttcagacttcagacatcttaggagttcattttgagattgatagcttgtgagtgctgatgtctactttatttataaccagtctaatttgtggcaacacatttagttctagtggatgataattggatatttagtgagtgttaactatcatcatgtgagattgtggtctctaaaaaaaattgcccagcactgcaacagacaatagcatatgcactctcctgcagcaattttggacatttgggcgtgtgggatgtcttggtattactgtcatacattggtctcacgtggatgtcctgtattctatttcattggtatagtggaagtgaataatccatttatgcttcttattttagctttacaattgagcaagtttaagtttggtggttttggtctttagcaggtgaccattaacttaggaagcatgttttgcttcagaaaacaggctagtaattgtggtaggaagacattgttttatttgacaaaatcataacagtacctttgcaactacttctgtagttggaatattttttggtatttacaacataattgaacattttgtccgttatggctagaacacgtagcaccctgactatggctgaaatggaggctgccagcaggtatgttgggttgctatctggaaccatgcaaaatagcattccatttgttagctgctccagctttttctgtatgttgggtcaattaggtcatgctttacccatatttttagtttagcatcagatggccgttcatacagattataaactccctcctgtcaagaaactagaccgtttggagattatcgttttgttcacaaaagcaagacatctggaaagatttggggtcatttggccacctatgccccttattaaatgactttatgcatgctaagttgaaatttctagaggaagttaattgcgacagtattatgacaagtcactgattaatcattccttggtagatgcaaacaagccccaaacattttcctttgctgactgaagggagtattgtttccacaaatttgtgattttggtagcattccgaatggttgaattgtcaacagtgttgaccacgtccagactagttcctcaaatgtttctatgtttgataattcctgatgaaaagttaatgtgtggcttgttacatgtagatatgcacatggtgcgctcggacattgtcatctttaactgcacggtcacgccaagaagatcggtatggagttgctcaactcacaggctgcaatgctgctgtgatgtctactttgctgtctgcgctagttgccgttgaggcctgtttggggaagaaaactaacccacaacctgcgcactcactgggtccagcaagcattaagtgggctaacttttccaccgggagaaaaggcaatgtaactgccattgcaagcacgcaaagaggtggtcttcacactaaagctttttccatggccgatgttattcgaacttcgatctatcagatggtttcagcctttgagcatgacatgcgggcaaatgctaaagcatcaagtttggagaagaactggatcagtgaaggaagaaaacctgtatttggttcacaggctgtgttggttcagaagctgagcctgtttattgagtaccgtgctgtctgaacttggcatcctgtaccaaatccttaccggccatttaaattattcttggatgaaggttatttcgttttggatttggatgggagagtttgtttgactatgaatctttcgaacagattatgactctcattcaggttcagggggccaatattttatatcaagaacgacttggatagtggcattttctgctcataatcgtcaggatgtaagaaagacatgaattgttatacctatggagagcttttcaaaagataattacatttctccactgggaaaaagccacgctggttttgaaaaactatgccggtgaacctgctgtatactacttttcattttctcaccctggagttgtaatctgtatgttgtcatgggagaaggaaaccagagctgtgctgaactcaataggcttattggaattttcgttctcacaatgtaacttgtttgttagtcttacccacttaacagcttcacctgaagttctagtcaaattctaatgctttcattgatttacgtgatgttgtcgcctaatcttacattttcattttgggttacttgttacagctttgagccatttgaaatttgagttggcaaaactcccttgtgctttttctatgacagtttcatgatttcatcttggatcaaaactcagaaggcacatcctggaagaggcgtactttctaattgagcattctaactatccacctcatcaatcgtggatttatgttacaacaagctcacccaacaaattaccacggacagtggaaatggaccaccaaacagcgaaaatgccggtcattcagagtacttatgtacagacgggtaaacacgttgcttcgactgcaactatcaccaaactttctactacctagttaacgacgagaaacttagctgccaccccctccggcctcgccggcgcggccagcggcggccgcctcggcgaggcggcgagcatcgagagggcggccctcgcggtcgccttcttggcgccggcgacgacggccttggggcaatgccggcgcggcgacaggacgcgcccgcggtgcgcgtccaggcctcccccgcagctctgcgacggcttgaggcgcttcctcggcggcttcgccaggtcctccagcgaggcgaccgccgccagcgacgcgaacgactgcgactttccgtcgaagaacctcgacaaccccctcctgcaaacgaaaaaaatgaaaaaaaaaaacactccggtgtcagctcagctagctcaaggatcatcaaagatcaagaagaacgcgaccagctagagcaaacggcacgcacttgaacgggagctgcgtcatgaggtcggacatctcgaagcggcgctccgccgagctggaggaggaggaggagctcgcgtcgtcggcgagctccgaggacgaccccgacgaccgcgccgagctccccgccgacgtggacggcgacccgatatcctcctcctgctcctcgcaatccgccgcgccgccgcgccggcaccacgcgtacgcgtccatgtatatatccccaactcttgactctccccgaccaacgccgatctcagatcaaggcaagcgaacgcagctcagatcgatcaaagcaacaaccgagccgtgtcgtcgtcgactggtggaaagaaggcagctggtacaaattataaaggtgtggaggaggaggaggagaccgtggccgtggtggcgaggtgagtcactgctggcagaggaggataagaacgagcgagaactgaagtagtagcggagagcgtacgcgaggcgagcggatgagataaaagaagaaaaaaaacaccggtcgtttatttgtttatcgcgtgtgcggcgcggtagggaagggaaggagtaaaaactaaaaaatagattcggcgttatcgcttttcttttgggttttttatccgctgggttcggcgttcgaattcttgctctccgttttttttttctttttccggagaacggggggagggggagagagtggataaggcctccacatgcgtatacgtgtgttcccgcgcgcgcgggcgcatcggaggccacacgcgacgcgatgctgctgcgtgcggctgaggctataggctagcggagtggagtagtagtagcgagtgggcgttgcttgtgattgggggaaacggaggagggccacacgctttacagccacatctttttaacctaagctaatgcttagtactcctatcagttaaaatttttttttaaccaatttaaggttattttatcgaaatttactttctaaattttttgcttttagattcttaagaacaatacgtaaatgtttattcataaattatttttaattttcttttgtaaatactacctccgtcccaaaataagtgcagccgtgaatatccgtgcccaacatttgaccgtccgtcttatttaaaaaatttatgaaaaatttaaaaatatttagtcaaacataaaatactattcatattttatcatctaatagcaataaaaatactaatcataaaaaaaatttaaataagacaaacggtaaacgtgaatagtgtaaaaccgtatttattttggaacggagggagtatgttattttgtttattcatgtataaaccaaacaatggtgccattaattcccgcctgcgccacgcgggtttgtgcagtccacctgctacggattttacttggatagtgcgggctgtgcggctactactacaaatgtgtgtttcgatttaccttgcgcgcgtggcgttcccatcttgttcttccgctgttgctcgtatagtggagtggactgctcgtacttgtggagtactgctctcttatatttaaaggatatatcttaaaatgtgtatgagctttgccctaaagcccattacaaaaatttgattatcaaacaaactaaacgcacaacgagcaacggcatgtgttcattaatcattatgttagtactttttagctagaagcctagaaccgcatcaaagtggcaagatggctttagcctttagttgtccaacagcagtagtatcgatggtacgtaagcttaataggacaaagacagaccatatgtggcatccatttccttttgtctaaaatatgtccccttttgctaaagaacaaatgtacatttgcaacctttctcaaaacataattaaaaaaatgcatgctatttgtcattgtatgatggaatatgccagatccggtaatctgcgactattataagtgtggaacaaacaacttgctactcctttgcaccactgttaccctcctgacagtgaaagaaacacaaagaaagctgcagctagctgagatgagactgtctctaatttaagaagagattattgacatagtctccaaaaaaaagagttaaatgaggatgattctctgtgtacttatcgcgcttcattacgagatgccgattgtgcaaagctgactcagctgacctggtaattgcccccctgaccactaactcgtggtccaatcttcacttttggtcttcgttgtatatcctttcaacaatatggggtacttatcctttcctacgacttgaatttataagctatatggtgatggttacattgggtatgaaatggatatgataatgaaagttggctctataatgagtccatggttttgtttggaggtgaggtgtgaatacactaagttttttactttctccgcttcatattataagaatttataacattacccacattcatatatatattaataaatctagacatatatttgtgtctagatttattaacatctatatgaaggtggacaatgctagaaagtcttataaactaaaacggaggtagtagcttctaacttctaattcattttcttaattttataattacatctttactcctttaaatgtatcttatggttgtgctggtgagtctgtctcaccaccaccacccaatatttggccccacataaatagtattcttaaaatcttgaggatttatattaggagtcggaaattctaaaacaagtagagccgctatggcaagggggaaaaatgtactactggtagagtctacttgtgattaattaaagtaggaaagcaggattagtgcgctaatcgattaagtcttatccgccgctaagtcaacagagtactacactactaatgaacttgcctgtgataacaaaggtacgaatccattcgttcgttctcctagtcacacacaagaggtagtataagaaaggcgaaagcaagtcctttttttgcgacagggttgtaatcttcgggcccaaacccgggaatgccatcattctgatttctggggggcaacattgacgacaccatgacgggttaattaggtaataaaataaactcgaggagttcgcaagcgaaagcatcgatcagaagacgatgacaatttatttaccctttgcctgacggtaatcaacgccgatcaactgtagtatactgaaaaaaatagagagaacattttgacacccaacgcgcgggaacaaatcgaaatgaagtagtatgaaactgtgcagcactcacggaccaatcaccaatttgagtctccgcgagaaacaaacaatcaccaatttgaagatttgtgtattttggatggatttcgggcatggtgcagcgagccaagctgtttttagggtgggcgcttgggccgtactgcacatttcatacatacgggccaggctgaaaaggcaagcctagttctgggctgaaacaagcccaccattgcttgcaacaaattcagctcaacatctcagaacaaagaacgttcatatttcaaaatccgaatcactccagcaacgaaatgagaaatacaggagacaaatttaattttcgcaaggattagaatcacatcatttcatctacggaaatgagcaagactgacaagtgagtgagtgacaacatggagtaataaaccgagtttctaagcatcaaactgaagattgtgtgggcttgtggcaatttatttgccttcagctaacagtagcaacaccaaccaagcatggtaaatacgtacgttttgactgccatttcccacaaacaaatcagcacgaaatcacattagcattcaagaaccaatcgccaattcgaaactttgttgtgttttttttctgcagcatagttcgaacttcgtatacagagatactaccactattctgttgcttttagatgattctctcaactactgtacgtgcttcaacaacagcttaccccttgttgcaaattcagatcagcattcacatctcaaatcacagcagcaacgggatcagaaatgcaggaaacaaataattttgctacgattgaaatcgtaatgtcattacatctatggaaatgagcaaatcacaaccaggagttgggatactactaatcctactactaaaaacccacccgtggcacatccgggtctctctacaccagcaaagcaaaaggacacaacaagagctaaaacaccagcaacagccagtccaggaggcggcggcggcagaggcggccagcgcgagggcgagggaggaccggagggctcagccgccgaagccgtagagggtgcggccctggcgcttgagcgcgtagacgacgtccatggcggtgacggtcttgcggcgggcgtgctccgtgtaggtgacggcgtcgcggatgacgttctcgaggaagatcttgagcacgccgcgggtctcctcgtagatgagcccggagatgcgcttcacgccccccctcctcgccagcctccggatcgccggcttggtgatcccctggatgttgtcgcggagcaccttgcggtggcgcttcgccccgcccttgcccagccccttgcctcccttgccgcgcccagacatcgccggagaccgagacgagaccgagacgaatccgagatggaagaagagagaagtctactacttggggagatctgaaatcgctgtggctcttggtgagatggatttggatttgggggtggttttatagaattttggggggattttgagtttgtgtttgggcgggagaatttttggggatagatttgcgcttttggtgggtgggtttgggacgttggattggtggtggacgggcgcgatgggttggggtgtgtttccgtggattgatgacgtggtgggaggcgcggggatggatccgtgggtggggggaggattgccgttggattgaatcggatggtggggaagctcgtcgttgcgagtggagcggatcggtgacgtggcaatggttctgtggccaggcgaggaacgtgggctgggccgggccgccggttttagctcggtctcctgatcagtcacgaggcccgtagcgtcaagtcaccggcccaccaccaccgtccggcgaataaacccgccgcctctcgtttcgccgccgccgccgtcgtcgccgtcgccgtcgccatctccaggtgggtgctatagcgataggctatggctttcgcgccgtccgcgcggagggtctcggccgtgctgtaccactacccgtgcccggacggcgcgttcgcggcgctcgccgcgcacctctacttctccgccgccgcgctccccgtctgcttcttccccaacaccgtctacgaccccatcaggtaaatcttctgtaacttaagagatcgacctttgggccttcgaactactagtttctgcttccaatgttcttctcctccataggttcgtttgaagagatgtgaaatcggcaggaagctgcaagcgagtacaactcttcctttacaatgtctaactgtagtttcagttcgtttagaccgaccaacatctgtggagctgctcaatgttcactttggcattgctttgcgcttattaagctttccctttgtattttagtgggagaaaattgcatctagttggcattctgacaagtccctttttggaggggaaagattatgctttggggtttctattctgtagtgacgtttggtatagtcaggcctaggtgaaatatacatttttttcccggatttcaatatttcatgaattatgaaaatgatgaatgggaggtcaaaattgaacaaagctgtttgatgattttgtcatgatatgagcctctgcacagcagatacagtgatgctcaagtgtttctctttactatagcattattcttactgttaccctctctgtaggagtgatgctcttccatttgatgaaatcaaagatgtttatctcctagactttgtcgggcctcctggttttgtcactgatattgccccaaaagtcgagaggtttgtaagcatttatctactgctatttgctttaagttttgttctgtgtgtgttagtttcatgtgcattatgctgttaatcttggattcttagaaataagattcagcctatgttcattctgtcattcatttaatatacagattcgatttccgtacacttcatgagtagattcagtatattctgtaaaatattttggggaaacacattgtggccatcaactgttctgaatattgctgaactgtagattgtagaagttatgcatcaatatttctatacattctgaattgttttgtagaatattctatccctaatgctaggacaattctaatgtttttatcttgttcagtgtcacaatcttggatcatcataaaactgcctttgaaagtttatgcgggaaccccacactcggagaaaatgtcaataaggtgattgacatgcaacgcagtggagcaacaatcgcatttgatttctttagcaacaaactcttgacaataggtagtagtttatggaatcatagaagtggcaattcttttaatggggtgaaatatctacctgataacaagcttgaaaccgtacacaagcttttcaagtttatagaggatggggatctgtggagatggaccattccgaatagcaaggccttcagcagtggcctgaaagatttggacattgagtttgatgtcaatatcaacagaaagttgtttgatcaggcaagtaacttggtactagtgttctgctacagtagcatatcctcattaaaaattcatggtacaaatctagcaccaccacttttgcatcactaaacctatatattgctagcctaattgttggttaaaaacaaagtctagatcttaaaatacattagtgccttctatacttggacagaatgattattgatgttgtcctactatacgagagctgttacaaaacattgaaatcaccgagctagccatcataccaaaatgctttttcatccaaagcttgtattgttttggtccaataacttcctgtgaagtggtattgttgcagttactggaactggatcctgaggaagtcatttctcgtggacaagcaacattgtcacacaagcaaaaattaattgatgaatgtctggagaaatcctatgaaattgcattaggatgtggcaggttcggtaattgtctggtaaatacctgcaggttttccttttctcttgattattttgtatgttcattaatattctattcatgttttgtcaacattctattatgtgaaggtgaatcgtccctacattcgtctataaattctgttatactacttgtttgatggggctgttgttgcaatttatgatggtccatgagctatatgtttgatccaaattagcacatttccagtaaactggatcagtagctatatttcgtgaccagggattaaaatttgacatattacaagaaaaaatcctgtggtcttttttggtacacgtagctttccagttccaggttctggaaccatctggtgtgcaactccactatccttacataaccaggacgtatcttttttccattagttctgcatgttttttttatttgtgcaatcattcccacctgaatttcaagatagcttacttatggtagctttatggttcgccgccatcgaatttgaggttctcttattatagcttaatactttactgatgcagaggcatgcaaccattcctacagcctaatgtctcagtatccgtaatactttttactctctttgtttgcattttaccaacattacaggctctgctgaattatatttttattgacccttaggctgtcaacgctgatgcaatttcaaatttgagaagcgaacttggaaatcagctagctgacaagagtcgtaatttaaatctgaggcaagttttctgttcaacctctccatgttgatgaacaatccatattgtttcttcaaagcgctatgttgttctaacacgaaccaatggtaccttctccagaagtattggcgctgtagtgtacaaagtacctgagttgaataatgacaatatgctgaaaataagtcttagaagtttgaacgaggaagacactacttctatctctaaggtacttcatcctccgatcaaatctataaggctgtaaagtagcatctgaaaatgatctattttaaggctgttgatttgttggcgtttgactctttttgtaggaatacggtggtggggggcatcggaatgcaagctcatttttgttgagcgttactgagttcgacaggtggaaggttggagctgaaccttgcaacactaaaatgtaagaacttcatcaacaaattgaatggttcataaagaaggaaatgcaggatgttacacaaaagcacaaaatggaaaaaacatcaagtcctaggccctgttcttttgttttcttagctaggaccagccgtgtctagctatctaggcacatgcacatccggtcagtggcgtgcctgtggttcatgaacatgagcccccagtatcattgtaagaaaaaaaaaactgtcagggtcgttttgaacatttttgttggagaagccaattgttagggactgactaggcgttgatcggctgatcgctattaaaggtgttttgaacgattagttgtcacaagcaagtactccctctatcaaaaaaaaattaagctaggagatcctagtagaacgaatttgtattaggagaaatctcctaggttgagttttttttaagacggagggagtagaccggatgcgacggtatgattcatgacatgaactgagcatgaagggaacaggcttggggcatgatcggatggctcatagggcgttcaaagtgcaaggacgtggccttcagccccatagaaaaaaacgaatattcagcgccacatcagcggtacgcgaagccaaacgaggttctcgtagccaaacatggatgctcgttcttcgttcgtcgaacgacttgcggagggcgaagaaagggtgaactgccgcgttgtggagggcggagcctcgcgggcgtggcttcgcatcagcgagggaaataacccccctttcccgcgctcacctcaccagagagaggagcggcgccgccaacggggagagaggagagcgtcgcggggctcatcgcggcccccgcctttgcgacggcctccgctggctacccctcgatctgcgcccactggagtttgtcggccacgctgccccgaccgcgataacctgcgcttgctgccggccgcaccgcccctcgatctgcacccgccggagctcgccggccacgccgccccccgatccgcgacgacctccgcttgctgtcggtcgcgccgcccctcgatctgcacccgccgcagctcatcggccacaccgcccctcgatccgcgacgacctccgctcactgctggccgcgctaccccttgatccgcggtggtcgaaagaagaggggaggtgctcgagccaccccgctgcccagacgccgttgagctcccgtcgtcctctgctatcgcgccgccgagctcccgcagtcccccactactgcgccgccgaccttgccgttgttgcaccggcaagcgccaagccctgccgctgctctgcccggtgatgtcgctgcttgggccgcttgggccgctcgggccgtcgccatctccgcccggcatgctctctgctgtgggaattttttttatttataatttttcttattaaaagttttacaaaaataattttccattttgaaaattgacggaaatagtcgcctaccgccctctgggagggcgatttttaaaaatcgccctcccagagggcggcgaaaatgacgtggcagacggccgttcgctctcgggcgacggccgtcaacgaaatttgcaggcggcccccttgccgccctccgcgagggcgattttgtactgtgcggggggccgcctgcaaatgggcggcgagggggggcatggaaatttgcaggcggcccccttgccgccctccgcgagggcgattttgcactgtgcggggggccgcctgcaaatgggcggcgagggggcatggaattttgcaggcggcccccttgccgccctgggggagggcgatttttgcctcccccctataaagcccagcccctcccctatgaaatttcattatattcactaaaaatccaaaaaaaacgaaagagagagagaggggagggcagcagaaggggagcggcgaagccctgctggttcgctcacttcatcacaggtatgctcccatacatcttttgcatttgtactaatatattacgtttgagtacatatgttgcgttttagttttagttccatatattttagcagatctgtagcacacagcacatatgtgtagatccagagcatagaatataatagtatgaattgagacatagacagtagtgttaattgtaagatgtagtttagtttgatctggagaatgtaacctacttttagaaatttagagaacaatattgtagagaatgtaacttagggcgtagtacagaaatgcgaggttaacgcagttattgttttcatcaggcacaatgtcaagtaaggtcacatttcagatagttcacggtgaaggaaatattagatttggtccagatggtgttgatctgtcagattttgtaatgacatctaagggcatcgataggcctgcggagagaacatttcagtcaatttatagttggttgttgagaggatttagaatagaccaagaagtctacacaatgtcagtatctgttgtagtgagtcgtgcaatagaaggttatttttgggaactaatgccgatggacagcactgctgcttggaaacggtatgtggaaatggcttttgaacggtcatggcccctcgttatatttgtgtcggtacaagagaaagatacaaatgtttcaatgcaaaccgaagatgtggagggtcctagcaatgcaggggatgttgttggaccatcgatgcaaaatgaggaaaatcaaccaagggaggagcaggccatgggcatggcggatgagggggagagagtcggtataattgttgatgaaatggagagggaagattcggataatgagcaagcggaggacgacgcatcatccgatgaggaaggtgatgtaatggccactgattgggcaaatgaggacttctctggtcttgttatatcagagggtgatcatgtaccctgggagtataaggagtacgaggtaattgagggtgcaaggtatgctcataaggatgagatgaaggaggcggtgaagcattgggcagtttcattgcagagagagtttagggtggtcaagtcaacaaattatgtgtatgaagtgaggtgcatgaaggaagattgtccgtggcgtgtccatgcatataagggtaaatggaatgattattggaaagttagcattgtgaccgagcacaagtgctacttacaaggggtggagaagtatcaccgaaacatcacttcagcttttgtggcaagtgagatgtacagcagtgttgttggtaacattggctttgaaccaaaatcaattattaggcacatcgagaacaaattcaagtacaccataagctatgcaaaggcctggagagccaaacaaaagatcattgagatgaggtatggcacatttgaagcttcttatgataatttgcctcgtttgttagccaccattgcccagaggaataataatacttactatgacctacatacatttacatcggttgaagatagaacaaagagtgtgctgcaaagagcctttttctcattgggtgcttgcatcaatgcttttgtgcattgtcgacctgttctatgcatagatggaacttttatgacaggtaaataccgaggtcagatattgacagcaattgggtgtgatgggaacaaccaggttctacctatggcttttgcatttgtagagagtgagaacactgaaagctggtactggttcctagagagagtgcacattgcagtggtgcgtatgaggcccaacgtttgccttatacatgatcgtcatgcgggtatgttgcgggctattgactacttgcagaacggttgggatgagaagggacttccagctaagtggcctgatgttcggagtcggtggtgcatgcgtcacatgggtgcaaatttctacaagcaattcaagaacaagcatcttatggagctctttaagaggctctgtgcacagaaccaagagaagaaatttaatgagttgtgggacaagttggatgagttgacaacgaagcaaacagatgagcaatctcgcagaccacaagttgaaggtgacgagcctcccatacctcttggtgcattacatgatgacccaccaacaatgagaaggaggtcagggtcggccatcagaaatttctctcagtggattgagaatgagcctaaggagaagtgggctctattgttcgacaccgatggatctcggtatggcataatgacaaccaatttggcagaggtgtacaactgggtaatgcgaggagttcgggtacttccattggttgctattgttgaattcatccttcacggcacgcaagcctactttagggatcgatacaagaaaattggtccgtccatggccgataacaacatagtgtttggcaacgtagtgacaaagtacatggaagataaaatcaaaaaggcacggagacatagagttgttgctcaaggcacacaagtgcatcggtatgaaataatgtgtgttgataggagcaggcgtggtatctatcgcaagcaagccgtgcaggaatgtgtcttgaaggcggatggtggatgtacctgcagttgtatgaagccgaagcttcatcaccttccttgctcacacgttcttgctgctgccggtgattgtggcatatctcccaatgtgtacgtctcaaattatttcaggaaagaagcaatctttcatacatggagtgaggagatatatgggttcgggatctcaggatcttacacaacgctgagtgcccaagttttttatatttcagatccatctaagtttagggtgaaaaagggtcgacgccaaactagacgcatcagaaatgatatggatgagtcagaagcaggtaggaggactttacgctgcagcaagtgtgatctgcgcggccatacttacaagacatgcccgaagaatgcagaagttccaagcggcgcagatgctagtccatctggacaggcaagtgatggtaggcgaccacctggtgaaggaacaacaagcaggcgcgcaaggccaaggcgtcgtcgcgcagcaggcgattccatggtgtaacaatgctttcgatttaggaaataaaatgatgtaatgagtgttcggactaaatacttctatcgtgtaatttcaattcaatcttgttgtaatgagtacctccgactattgttgtactagtagtattgcgaactattcggtgttgtatcataatgttatcgtgatgagtgttcggactaaacacttttgtttgtttgtactcttgtttaatatgtgttagtaattcgcttatgaacatttattacttatgttgaactaattatttatatgtttctgatcaacctatttgatgcaggtatggcgtacgacacaccggcactgttgaaccgtgggattgacaggaaccaccgctcgttcctgtcagcagtcgagggtgcacagctcggcaccttccgtccacgcacgtcgcgcgagtggttgcgtgtcgacccccgtcacgttccttggtacgcgtatgttcacatttcaactcaactttgctttgttttatacttatgtttgaagtttgctctatacaggttgcgtgcggcaggccttctaccactttgtaggcttgttgaggcggcggcggacgaccgtgacccagcgaagcggtgggatgcagaccggtcactccttgccgctcttgtagaccgctggagacctgagacgcacacgttccaccttccctgtggggagatggctccgacactgcaggacgtgtcgtacctgctcgggctaccgctggcgggagcaccagttggtcccgtcgacggtgtttttgggtggaaggaggatatcactgcgcgcttcgagcaggtgatgcgccttccacacctaggaccgaccaccacccttcctccgtactctacagtcgggcctagcaaggcttggttgctccagttcactgtaagtaaataagttgttattatcatacgtgcttatttgcgaccggatcagtgttttgtactaacatttcattcttaactgtaggcggaccttctgcaccctgacgctgatgattactcggtccgacgctcccttgaggcgtacctgttgtggttgttcgggtgggtgatgttcactagcacccacgggcacgctgtggacttccggctggtccactacgcacggtccatcgcggatgctcagccacaggacgtgccgcagtggagctggggttctgccgtgctagcagccacgtaccgtgccctctgtgaggcgtgcacgaagactgacgcgggagcgatcatcgctggctgtcctatgttgcttcagctttgggcagccgagaggtttgccatagggcgaccagtggtggacagcgcaccctacggggttggtcgcagcgcgcagtggccagaggacggtcccacgatggggacttactggtgtcgacgtggggttagtgcaacttcgtgtctaattccgatcatgtttattgcagcgtcgttacgctcacgtccaggtgagacgtggttacccggacttcgtgttcgagtttgaccgtctccagccgagcgacgtcatctgggagccgtacacagaagaggccgtcgctgcgagagcaccgctaggactttcgtccttgtgcacacgcgaccaggcttactggctcaccatcctgccgatggtgttcgacattttcgttgagcctcactggccgcagcgtgtgatgagacagttcggacttaggcaggtgtttcccggcaacgtgcagccgaccgtcccccctgccgaccactcgtgagttcggattgttcatttctaaatttttatgataattacatcatcgagccatacaatttacctctcttcacaggttgactcgacggggacagctagcaggcgcactttgggctccacgtgtacagcagtacgttgacgactgggtgttagctacagaggaggtgatcaacgagctcttcccacacacggaggagaactaccgtgactaccttcgctggtaccttcctcgcactcgtgcgcgtgtgaccttcactccagacgccccagagccgcacgttgccgctgtcacggacgcgtatcccacgcaccgtgaccgagactacttcgtggcggtacgtccaatttgtattacttccaacaattatgtcatttatcttgcataatataggacaactactgaattttttatttccatcttgcataggctgatgcggcacgggatatcagtgccgatatcaccgcagtccaggtgaggttgaacagaggtttgcacttgactgacgttgagcagaggtcgaccttcgaccggatgcaggagaagatgcgtgcggtcatgcgcgtcttctcctgtcgcagcgccgtggacgtcgtacctccagctggtccggtacacccacggcctcgcggtcctaccgtcggagcaggacctcgtttgtcttcgagcgcccctagcttcggagcagtgcgacctacagcaccggtttcgcacggtacagttcagcccagatattagttcatttttgtttcagcttttgcacgaatgtgtcaccatgttttaactgcacgtttcctcatcgcaggacctcgtatgccttcgagcgcgttcgcaggcacgaccggcgcttccgcgagctccgcaggggcgttcgccacctcttcaggcgcgttcgtcagctcttcctctcacggagcgtcgatccctcgcccacacggtactttactttttattaatactgttaaatacctatacgaaactgatggtccttgtccagcaggatttgcagccgggatcttcggtactggggcctcttcgtctcacgccggtaggactggtcctactagccagttctacgacgacgacttgcacggtgcagaccaccaggacgtactaggctcctctcagcttggaggagctccagaggcgcacactcaggagcagccagaggtcacacctgtacaggcaggacgggttggccgtgccgtacccccggaccgactcacgtactcccaggggcacattagggcgcagggtaggagggacaggggtaagaggcctcgtcagtagtgttctacctcttcagtccttatgtgaccgtttcttttggcttacaaacttgtaaagcagtacttacttttgctattactactgcagtactacttgtgtttgtctcgtctacgtagttcttttcattcgtatggtgcttgaacaacttatgctcacaacaacacactttcggcgcttcacggtagtgccatatccagtagcgcgcacagtccacaacagcacacatgaaaagcggcagctcgagttatcactatcaactttcggcgctgcctgttgacataaagtgaatcacgcccacgcgtgatcgtcttgtcacatctaatgaataatgtatctcattgagttcacatatattgcagtgaaaacgacgctatataattgacaatctgaaggcaacctcttcatatcttctttcccactaccacaccacacacgaaaatggaagcctattaattggtaatacgtaatctagaattgagattatgtacaacattcttcactacaattttacattttggcagcaaaccaaatatgatcaaatgcaattttaccttaccaaatatttggtagtgccaaaacttgcttatattttggcattaacaaaatatttgtacggtaacattccaaatatggcctaaaaaataataaaattgtattttaccaatcttggagattttaatcttgtatagttttcaatataaaaagatttgataactattgatatttatataaaaaaatatagagcacagtacaaaatcgccctcccccagggcggcaagggggccgcctgcaaaattccatgccccctcgccgcccatttgcaggcgggcccccgcacagtgcaaaatcgccctcgcggagggcggcaagggggccgcctgcaaatttccatgccccccctcgccgcccatttgcaggcggccccccgcacagtacaaaatcgccctcgcggagggcggcaagggggccgcctgcaaatttcgttgacggccgtcgcccgagagcgaacggccgtctgccacgtcattttcgccgccctctgggagggcgatttttaaaaatcgccctcccagagggcggtaggcgactatttccgtcaattttcaaaatggaaaattatttttgtaaaacttttaataaaaaaaattataaataaaaaaaattcttgctgtggggaaaggagaagaggagagagagggggagaggaaaaggtggtaaagtgataaagttagtactagtaggacccactatagacaacttgcactgtgaaaacaagtagctaatattgttcttagtctaggtgacacgtgaggctcaccaaaatttggtgttgcactgtgaacgcctttacagtacttgcttgacgtgttgttctgaacttcaactatatgatccatgcataacagttgtacagtatggcacagtgccacagtgaacctggagtcctctatgctctgcttctgccttccctttcctcttcgttttatcatctactgcctgtcaaaaaaaaatcaaaccctaagtttgactatgtcgaggtatgagtacagattaccccctccggctaaaaaaaataaatcaaaccgatttttttagacggaggggtaatatgtaatcatacctaatttagagtttgatttattttttttagacagagggggtaatctgtactcatactcgacatagtcaaactattgatttttatttggcaagtttattatatatgttttagaaagagctaatgtccggtatgtatgttgtctttttcgtgcttgagtttctggatgaataattctgagtggagtattatcagaaaaaactaatttgtttatattcatagccagggtaaattttttaatataagaagaaacgatggagtatgtgcaagtgatacaccctgatggttcaaaaaaaaaaaacaccctgatcgattccctctgcttcgagctagtggtgactttttcgaaacaggttggcgcgccgcccacggttgcaccgacccccggcagccagtacgtagcacaggcagtgtaggcacgtaccactgtaccagtgtgtacaactatataaggccagtcacaatggctagtgtcattgcacggctacccaaaatattataccatcttctctcaaatgaaatcttttatgaaacaatccccacagtggaggggtttcactttgacgtttccaagactaagcaaagcatttaattgatacaagttgctgggatcatttgtacccaaaatccggcgcggcgcgggagaatgcagaggtcgcacggcggaggcggacgcaagagatccggtgaatgaaacgaatcggcctcaacgggggtttcactctgttaccgaggacttggaaacgacgctgacgagtttcaccaggatgaaactctttccttctctctcatccccatttcatgcaaataatcattttttattcagtcttacccctattaaatgtgcatgacacaccagtgaaacccccattgtgactggcctaaagaggatgcgacgcttgccggtcccatggctttagtgagaacgtgcacaggcaggcaggcaggatgcacgggttgggggctaatgcacgaatgttcgcgtgtccgggccacacgcacaaatgcgtctaaaacagcccacgttcgtctgccctactgtgaggtgtctgactcggacttcactcggacctgtgcacttctctttttttttttttcaatcaaaattcctcttggaccttcggatgccaaccacagcctccctctgacgagctttgtttgggcaaccagattttcccccgcaccacagctgatatagcgaatgacgactaaccttgtcaatcgctttagtcattgatcactcaagacacgtcagataaggtgatacatgaacacacaatatttgttaatgaattagtcttcctacgttacactgcattgtagtcgccatctgacatatattggatgattaatgaccgaagtgattaagaaggttaatcatcgctccgagcctccagcaacgagcgttgccatcatctaccacgtccagccctaactggttggcgcccttttctcctgccaccaaactcatcccctgccctctcccaatctacaaagttgtcactggcctcaccatcaccaccgccggtcgccactacttcggttatccctctaagcctcgggaacacccccacaagcaaccaaaatttgtttgtgtggagactctctacctagctatccatcccatatctactaattgtgttgctataagctaggattagagatgataaaggtgttagcctataggaaatgcaaaagtacgggatcccatccttgtatctgccactactaggaaaactattttttccagcggatgaaaacggttttcctaagtggaccggccgtccggtccacctgtaagcaaaagcctgcgaagatgcattttcgtctgtctaccaaaatgcatcttcacaggcggacgagcatcccatcccccgttgccgttttcacaggaggacatttagttccgaaaatgatacccgcctagaaaaatggaagggtctcgttttgcgaaaatggttttcctagtagtgtgcttctcgcacgaggtgcgcaccgccgtcgctcctcctcgataacgagccgaggaatagcacaagcgatggtggtgtaggtgaccaggggccataaggaggtcttcttgcgccatggggatggagcggtaagttgatgcaagacctagcggtgggacaatgaaaacgactgacggcaggagctcggtgcaaagggagccacggagactgacgtcagggtctattgggtgggacgacagttggatgtgcacagcctgtgtgccacactggtcgtgcaccacctttccacgggtcgaggattggaggatatgcatgccagtgccatgaacagtgataggcgacagcttgttcaagatcaggtgtcgcagtcttcctctcccgataccaccgccgcccactacccacatgcaccatcaccagcgcgtgccaaaacatacatagagaaggtcaattgagaaggcgaagcatcaggaagaagacaacagcggattccctaactcgtaccaggcattcatttctgctaggtggatgaaggtggctggtatcctggtgatctaaatgagaaacgcccaggggttttccggctagcttcacaaggtggtgggctatacgatctgagtttaaagcctcactccttctaattatttgatattaggtcattccctaatacgtatgtcttttttttcacggcaatcagaactccgcctccttctcatgcacccgatgccttttctcctctcctcctaacccaggtctaaaacatgataaatatcaatcaagaattaagaaatcggatggagtagttatatacaaatcaatccgtaaagtgagaattatcgcgtgatccaattaaagctttcaccgagcaaccagggtgctcggcatgtacacgcacgaaccatacaagcaagtacagagaccacacaaacaaactccattttcttcaccacatgcacatgcgagggtccagccgccggtgacccacccaagtacccaaactctccatttacgggcgatgccgggccaggctgttgctgttccttcccggcaccacgggcgcggcttctgttcacgccccgtccggcacgcgtggccgtgcccgtgcccgggaaaccgcggccatcatccgtgtccctccttttccacctcattgtttgcctcctttcccatgcatgctgctgctcaaactactgtactctgcatgcaaccagggtttcccttattgttattggcgcggttatcacacccccatggtaaggtggttacgtaccgtggtaactgcgcggttaccgtgaaaactgtgtggtaaccgcgagacatatcatggttttaaaaactgaaaatgttaccatgcatagtaaccgcatgataatcgtgcggttttgtaaacccagcatgcaacccatctgaacttgtaggccttaataactcgaatgccattcgttaaaatgtggattctatgtaaagaatcaaagatgatgctaggcacagatcgagattatggttatatgaattactgatgatgcagagatcaaagatgtatcctagtagcttgttatctaataaaagaccatcaagattatgctggtgcgagttagtactaggctttgccggtagaccatggatcactactcattagaagggacccaacacgaacgcatacgcatcacgcatgcagtgcttcaaagagcgagagcgtgcagttctctgatcactccagcggtgcttcttttgacatagaattattaccgctaggacacactccaagcaaggacgcatgtcatgagctgggagaggtccctactcctcgggaagtgtttagatgggactaaaactttttagcccatgtcacatcggatgtttgaacgctaatttagagtattaaacatagactaataaaaaaactaatttcataaatgagagctaatccgcgagacgattttttaagcctaattaatccataattatcaaaagtttactgtagcatcacattgtcaaaatcatggcgtaattagacttaaaagattcgtctcgcgaattagtccaagcttatggaatggattttgtaattagtatatgtttaatactctaaattagtatccaaacatccgatgtgacagagacttggaataagtcctggaaaccaaacagagtcttactcctacatggctaacagatcaatattgtgaacctaagatggtaggacatggacagccgcgtaggccatcgtatgtatttatgcgtggacacagctagtaagtgtatctgtgtataatccaaggacagctttgaggcgcattttgacaactccgtacaaagatcacggatcagcccctgcattgcatgctgttcttcactttcatctgctcaaaatttcaaaaaaaaaaagtttcacctgcgcgtgtatgcatccaatggatacaaacgtacaattgcaatataatccttctaagagcgagagagttgaggagactagcaactcatcgcatgcacgaaaagccaatttgatacatggagcggtggagccatcagccatggatgcggcatgtgtccgagctacatggactaactaaattaaccaatgttggcattattgtccactaattcactcttgcatgttccaaagagagaacctctcataaaggttccgccgaggtgcatgcacttacagaaagtaaatggtgcaatgcacgtaggcattacgtcctaaattctccatctaatggcatcacaacaacaccgagttgcacagaaccctgtcacatgacaggaactcagcaagacgtactcctagtacgtgccattgtgccaatcaccagcgaccgatttgacgcaattattcgggaccgtgcccgatgtatgtagtacgtgcctacgagtagcgcaaccaccggcctcaatttaggccaaatcaaactttatacccagtgaggggatgtgtatgtttttcacctacttcgtactgtatggcttcacaagtttcacatgccatgccttccagtcactccacatgccagcagacagctagctcctacattttgtctcatccacagtaataaaagggttaatttggacttactggtactatttgctgcacctgtttttacccgtgtaggaggcatacaaatatgccttttttgagaccgtaggtgcagaacaagtgcaaatagctgcagaacaagagtagggctgtgtataagattatggtgccattttgagcatgaacagcgggtaacaatcgctagagaaatcgtccacgagttactgccaatgccatgacgctacacgggaaatgcaaggggaacaaatcaacacatttactgctgttgaggaggcaggacaagttttatcttttcccttggcccgtcatgcttgtctcgttggtgctttcacatgcctacttgccttctctaccttttcttccccaccatccatcttttcacttccagctgtaacaacatcgtcaccttaagcatctccatggctccatgaccactggtgttaataagcaatctacccttgcaaaaacactaacactaacctttgcgagaacaaggtgacgaattcaactcctacctgatcagtggacaccgcagaaaatccttggggatgcacacgaccaaagcagcaccagcagtacaactgatcacagtacgactgcaataggataaatgcgcaatgaatagacatgtcgtgagcaaaggtgagcgcataaatgcacgtagcaccggtagacatagtacatttgtaggcagtgatactgatacatacagtactggggagacgaaaggtagaatacgaaattatgagctacgaagacgtcacgatcgctgctcgttggagaaaaagggagagaaaaaacgtaccccagcaagatcaagtcagcaaaagcgaccgagacggcatcatttgcagacaggagtgaccaaacagttgtgcaggccagaacgggggcagcgcctgcctacgctgcacacgtgctgcatcactacccccctccatcgtctcttctttcggaccatcatgtgctgtcccaaaatcctaacagcagtgcgtggatgcttgcctctgcaaatccaacctcattactatctaaaacgtccaaactcatgatcacgatactagtaccacgtttctggaccacagctgggcaaggagccaaggatggttaactggccaccctagacagatcggatgcccgtgaattttaaacaatgtaaggttgttacggtagtggagtaattctgttattcgatgcattctttgagaaatgctgatcatggtaatcagagatcggatgatccaattatgcaagattttcagcaaaactgaggtagtttaatgtaccgactgatgaagagatgctagggaaaaggaaggcagtgaccaggttttccggggcttgtggcatgcagttgtggcaaatcctgagatttgacatgaaatccaagatttctgaagcgcctactcacgctaacagaggaaagctaaatgccactgctgttcggtacactcgaagtcacaaactacagagagatgccgcactagcactacccaagagaaaatatacggaaagcgaggggcgcagaatcaaaagggagaacaggatttacctctgcaggttgtgtcgaacgaagactgactgcctgcctctctcatctttaaacccagcagttaataaaattgccaccgtttccttttccggggcccctgaattgcgcaggtcgccttcagtgacggtgctgcttcttctccctcctccgtccgtcctcaagctctgcccccgtccgtccgtcctctctcttgctttgcttctttccttgcgtggttctttctttctgtcactttgctgccatcttttgctttctcccactgttgatcaaaggaggtttgaacttgagctcagctcaggggcaaggcatcgctctccgtttcttttgctgcgtctttcctggctgcaatggctgggagctttgaggggaggagccctgcagctagaggagtcgagcaggtatgcaacatgaagcgtttttcttttgcatcttcttttaaagcattgtggtatattcatgcttatgccaatgattcttcttttgctctcctacaattccaacaatgcatctttgctaagttggatggatttgctcttcttgtttgtcttcaaggagccaataaacactgcattcttattgagaaagtattagacaccattatttcattttcaggatatagtaagctatatgcacgtcattttttttccaagatgttgagtgagcatgacatttgcttctgtggccgcccaaagttccaaatgcgcttaatataatgtcatttcattttcttgtctgtatccttttggggttcacttataacagaagacatcaaacctgaaaaggacatcttcctccattacgcgatttaattttctggttctttccttcaggcgcttgttgctctgaagaagggtgcacatctcctgaaatgtgggaagagagggaagcccaagttatgcccattcaggctatcttcagtgagtagcttcgttactgtaattatgcttagcagcatgctaaagatcgattttattcattaactttcatggattacgcatgcaacctagtgacgactagagacatgtagcaaaacatatgttcagtgcctatgagatatttatttagttgtgttaatctgaatgttctgaacatttaacatgaatgactccattacaggcttatttacttaatgcacggaactttgatggaagaagtataataactattcagccacttgaattaaacaaataaaaattaagtccgcatgaagctcatgccaagtaaattaactgatgctacttagtttgttttggcttccaagttcttcaccatgttccgttgagcagagccatgaccagaactcttagatgaattccgcccagttatccacttctccttcatctatctgcatatcaagatctcacgatgttcctccgcaacctttcaaagatgttccttgttttcccaccgctgataaacagatgacatgtcacaatgagattaacatttatggccatacatacagctacgtcagtagattactccaaatctagctctctgcactcccaccatccatcctttattctgaaattagcaattcaatttccgtaatgtagagaagattgtaacactatgaacacaacaaggtatgatgtttgaatattaaatattctaaaattaggtctgcaatatctacttcttcccagttcccatggaacgtatccagttcagataagtagattgagtaaactgcacattaacgtcttatctttttaaaacattagaattcaagatgctgtgcctctaaataacattaacatgcttcttttgcaggatgagaaaatgctcatgtggtattccaaagacagggaaaagcgtttgaacttgagctctgtctcaagtgtagttcttggacataagacagtatgtggttttcatttctcaagcacattgctattctttgtccatagtacatcattaaggatagaacacgttcattttctgaggattctagtattttacagacaaaacttttacgtctgcattggccagaaaaggaatcccactcattgtcagtcttctacaagaatggtgaatgttcacttgacttggtatttttactcactaggcctgttgtttagactttgtaaattttatccttcacattattaccttccgtaacatttttctaaatcacatttcgcagatttgcaaagatagggatcaagctgaatgttggtatataggcctaacaaccttactatcagttccatgcagtccagtacttttgattgactcaacaagtagccgtcggataaacagctgtacaaatagccctcctagctatattcagcaaaggagtaggctatttgctgtgcatgacacaagaaagtttaaacaggttcattctataacttgtgcatgctgtgatttctatgtgataattttgcaacttaccacaactacaagtgtgttttgatttttcctaagttatgctaagtaacacgatttgatccataggctcaggaaattgtaaatatgtaatatttcaaatgatggtcatgctagttgtgttgaaatattattcatttcaactaattagttcttatccaaatataacaataatgatacagctaaatgacaaccacattgacagacttttgcataaatgataagcgacacctctttttttttcttgcaaatcatgaaactaagtagagcgatacgacctacgattggtcataagttgccctatgttctcagttacaaagtgtgtttcacctttttagttgaaatgacatgtttttctacatgatttctccatcaaggtacactcaatatatggcagtcctaggctgatgcagaaaaatgttttgcaaagcaatctggatttctcagaaccattcttctctccaaggcagaggacatggtcagacctagactactacatggaaaaggtcactcccgatgtggttaatagggtaaaacacagttgcagggatataaaagttgctgacaaacttaacgagcaaataattacccaactgcctaaacaaaaatcatctgaggggttacatgttgcatatggagcaacttctctgaaggacatctttgtctggggagaagttcctggcaatgttttagatcatggagatgtatcaaaagccaatgtttcacttccaaggttattaaacacgacacatattattgatgtgcagagcgttgcttgtggagagaaacacgcagcgatagttactaagcagggagaggtcttctcctggggtgtggataatggtgggagattggggcacaaagtgagtgtcagtgtatcagatcctaaaattatcgagtctcttgcctctacacgagtgaaggctattgcatttggagcaaagcacacctgtgcagtttcaatttcaggagaactttatgaatggggtgaagggactcactgcttgggtttgtggggtgatcagtatcaaagaagccaatggttcccacataaattgtttggtcctttggatggcatctcaatcttgaagattgcatgtggtcattggcacacggctatcatatcctctgctggccagctcttcgcatatggagatggaacctttggtgttcttggacatggtgacacgctgaccgttgctcggcccaaacaagtggagtccctgaaaggggtacgagccaaggccattgcgtgtggaccatggcacacagctgctattgtagaaagaatgggcactgtcaagagcaatgctcctagtgggaagctgttcacatggggtgatgcggatagagggaagctgggtcatgctgacaaaaagatgaaacttgtaccaacttgtgttgagccactcaatgattttgattttgctcaggtatcctgtgcaaaagcacaaaccattgtgcttacaataaccggtgttgtttttaccattggaagcaaggaacacggacgattagggaaccctctgtctgaggacacatctatttgtttaattgaggggccacttaagacagagtttgtcagagagatatcatcaggctcttcacatatagcagttttgacaatgaatggaaaggtgtttacatggggcaaaggaacagaagggcaacttggtttaggtgactatgttgacaggagctacccgactctggtcgaggccttggaagacaagcaggtgcatagtatagcttgtggtttcaacttcactatggcaatttgtttacataggccactctcaagcaaggaccaatctgtgtgcagcaactgccagctaacatttggctttacgaggaagaagcacaactgttacaactgtggttccatgttctgcaattcctgcagcaataacaaggtttccagagcagctcttgcaccagataggagcaaaaggtaccgtgtttgtgatgcatgtttcagtcaaatgcagaaagttgaggagcatagaaaattagatccacaacagaagatccaaaaggatgaggtatgtccaatagaaataagatcatatacgccaaaattggcgcgcatattcaaggaagcaaatgcaattatggagaaaatggcatcagcacaaagcccccatcagagaagtcagaatttggctgtgccagatcatgtgaggacattaagatggggcctagtagagtgccccagtcaattcagatgtgtgagagagagcattccttattgttcaacattgaataaacagacagtctctggttctattgtacgggtaatgaatgagacaatggcacctaaacctgccagctctttgctcaaatctgctaatgattcaaaagcggaattagacttgatggaaaatatattattggaagaagtgaaacagcttcaagagcaggtaactgacataccatattctctgtaataaacatgtttcgtggatctgtttaaattatttgttttcactgaatgtttgttctggtatgcaacgtataatttagtgataaagatggaaattatgttttatataagcaggtaactactcttgcaaaacagtgccgccaaaggagcctgaaagttcagctgtacaaacgaaaagtcgaggagacttggttaattgccaaggatgaggctgcgaagtgcaaagctgctaaagacataattaaggttttgatcgatcaggtataaaaccgatgacctatctccatttgacagatttaccggcttttttttctaaataagttgtgtggggtgcccaattgtgcagcatgattttttatcaaagaaccttttggctggtgagaaattagacaactccagaatcatgcctagccacatcgccagtgcaaaatcactaaaagcagaattaccagacccacctgacaaaaatgtattcaccagcgaatttcaacagtcgaagagcaacagagatcaccacaacagcaggcaggtggatagggaatgcacacaaccttcaattgcttccatggcgaattactcggttacgcatcagaattgcagaagaacttccaacggcagcaccagatgcaccgagggaacagatgccaccactgctcctaccgattccaacggtgtgatcgagcagatcgagcgcggggtttacgcgacagtggttacatcccccggtgggaagaagtgcatcaagcgcatccggttcaggtgagatcccccaagaacctagattataatcaatcagttgtcaacgatggcatcatgtcttacctttgcaataactaactctttcaatctcgcagtcggaagcactttggagaggatcaggcgcagaaatggtgggaagccaatgagagcatgatttttggaaaatacagcagcatggaacaaacggtggggtaatctcttctccaactccaagcaacccaaatgaagaacataaaggaatagtcagctctgccgccaaattgttaataggacacagtagaagtagatagaaatatgctactgctcgatgaactggcgtggataggatggggatcatggagaaaaatcagaaaaaggggttgagactttgagagaccagctctgaacagtaaactgcatctggattgtgcggctgtggcttgcggaatttggagtaggatctaggtttaacctctccacccgtttgaattggattaggaattgacgcctctttggactgatttcgattacgcgagggttagtatgtagcgtggacgcgttggccttccctgatcggagagattaaaagcaaaggacagaggagacgagacgtaccggagggtccagagcggcgccgtgacctgatcggcgcagacgcctgcgcgcctccctccgcctccgtttcctcctcctcctccccgtttcggctactcgcctcgtcgttgccgacggtggcgtgcccacaccacctcaccgccgccgcgcttcgcaaaggcggattccgatatcatgttgcggattttggtcgatccggtgttgcggcctgcacgtatcttaaagcgctattagaataaatcctagcctttggcttttctgtttggaaccatattttcgtcctcctaacttccattttgcgcttgccactagctcatcattatctgagttgttatctttagagcaagtatagcaggaaatacctctaaatcatttataatcaatttatttaatatgtaatacatatataattactacatctgtcccaaaatataagcatttttagctataaatctggataaacagttgtccagattcacagcaaaaaatctatctatctattatattattaaaacagctttgaaaggagtcaccacattcgctgtgggggctagaaattcccacattaatcggagaaaaagaaaaaaaaagaaaagaagagtccaagtagaagcacaatctaaaaatagctgaaattcggatttaaaaataagcaatattgaaagaagtttccatataagaacccaatacgagattaatcaaaattcgaaataaaaataaaataaaatctaaaattagaaaaggaaaggagagtccaagtagaaatacaatttaaaaatagctgaaattcagaattaaaaataagcaatattggaagaagtttccatataagaacccaatacgatattaattaaaatttgaaataaaaataaaataaaatctaaaattagaaaaggaaaagagagtccaattaggaatacaatttaaaaatagctgaaattcggaattaaaaataagtaatattaaaagaagattccatataagaacccaatacgagattaattaaaattcagaataaaaataaaaataaatctgaaattagcaaaagaaaataaagaagagttcaagtaggattacaatttaaaattagctgaaattcggaattaaaaagaagcaatatttaaagaaaaaccatataagaacccaacacgagattaattaaaatttcaaataaaattataataatatccaaaaatagaaaaattaaaacagagttcaagtaggaatacaactttgaaacaactaaaattcaaaataaaaaataaaaacattaaaagaacacaatacgttattaactaatttttttagaaaaaaataaattctgaaattagaaaaaaaatattttaattaggaataaaatttataaacaactaaaatttgtgataaaaataaagactattgaaagaaaagaccatctaaaacacatgacgagataaattaagtaacatgcctataaagtagtagagttggtggcggttaatactgtcgacgggtgatacccgtagaccggatatagagggtattggggtacgttggtacaaggatctacgtagtacgacatcaagcaaacaaaagacaagaattatactggttcaggccccttgacaggtaatagccctaatccagttgatgtgggattatatggtaaaaaacataggttacaaagagaacaagggaacttgtcggatccggcgagattgtagtcgagttgattcgactagctctcgatgacttggctccttgcaagcttcggcttcgtaggctgtggaggttgtgttgggtctaagattcgatcctaaaccctccccgggagccccttttatatcgcagatgtggaggtctcctcatagaactcggaggtatcagaccctatacgatacgccaacgacccagttctgcccgagtaggattcttcccatctgtagattccgtgaaaagtttccttaggatatacaggaaatatccgcatgcgcgtgggtatgccatatcgatatgtaacgtatatcgaagggtaaagggtatgcctaacccgtaaccctgacagtagtccccgacttctgcttaaaatgaactcgtgcaaccatttgcgacttcgggtgtcgagactgttgtcattcccggtgcgaggaccgtggagatagaccgtagtcgagcacgccatttgaagcccaacggtcacgagcgaattttaaactgaagtccaaaaaaccgccgcgcgtaacgggaccagaaatttccggtgggcatctctctctgttccctggaattcgcaccgtcggtagtgcgcctatttaaaggaattttgggagtccattttgaagtccgccaaacctgttatacacgcaccacctccaagaactctttgccttctcagccgccgcaagaaaccctagttcgtcaacctaggctcgttttccggcgaccttcgatcagcaatggacctcggcaaatcggcttccaccagtgcaacgttgaagaaactccaggaggatggcactcttcctggctgtggaaccatggagagggaagcatgaggtactaatcctcagcccatcttgggtcgcatggttgtgatcgaagattatgttctctgcggttttctccctccaccttccgaatttcttctcctggttttgaatttctatggtctttctcttctccatttgaaccccaattccatcgccttcctcagcatctttgtgcatctttgcgaggcctacattggggtagagcctttccttgatctttttcgcttttactacgaactgtgttggatggaatccaacagggtatctggttgcgtcgggttccgacttcgggatggcctgaagtcgcgttacattcccttccagtgccttcttctcgcagcaagtggaggaataggtggttttatcttgagatcaagaactcgaaccctgtctttgtggttcccgaagatcaaccggataagattccgtcttggaccgcaaagccccccttgaccccctctcttcagtcgtttatcgacatcatcgacgatctccgagtacggggtttgtcgggatatgaagtcgttgcagacttcgttggtaggtggatccagccgcttcaggctcgggcccatccagcttataactattccgggtcagaggacgcgacccgggtttctcctcggggtatctttctcgcatttatcttgacatacttgtgtttgcattcctcttgacttatcgaaggttggttctcgattaacaggtctgagcggcaaaaccgtggagcgccgcgtcggccaagtgatgatcagtggcccgaccacggtgagtgacatccctgtgcccctttgtgaaaagggggcggcggaacgtgataaagccatcaacgtaagtatattcgataaacatcctgcattctcctttcgaaatcactttatgacttgattgagcgtaggctcttcctttgactgatgtcatcggaccgctcgcggaccatcaggtggcgtcatctctaaaagtgaaggtcgtcaaggaggtgtctgatgctgccaccactagcggtggcaatgttccgacaaagccgaggaaattctcgtctgtaagcggacatcgtcgcaaggcgtcgaccccctcggtaatttattttgtcgttaaatcatgcagcaagaaggatttttccttactttgcgttgattgtctttcaggcctcggacgcgtctcccccacctccacgacgacaacgcattgtgacgatcggcgagaagtaagtagatgaattcttgaatccccgcgcttcttattcgattattgtctgactcatggtcgtcctgtagggaggcgcggacaaaggctgcacgagccaagtctagaggagcttccagtgcgtcgcccgtcgtggcctcaacggatgtcgtgcccgtagccgagagccgggaggcgatgcctagtggcccagtcagcgaccccgcggtaggtcgtgatctgccagctgcagtcctcacctgggaggagctccaagtcgagatggggcgcctcctcgaagccggtgctcgcggcatcgaccgcgagattgcggaggcgaggtcggaagcggcgacggcgaacgcgcgtgctgacagactggtgtgcgagttggttgaagcccgtgaagacctcacgaagatgagggagttggcagccggcaacgagcgacaacggaaggggctcgaggaccgaatgtcggaactcgggaacaacctatctgagatccggggctcgttgagggtcacctacactagccttcaccagctcgtcggggaatgcggcgtcacgtccacgatcccggtgaatcccgatgagttttcgctgacctcctctctcgcagaattggtgacggcgatgggggaaatcccctccaagcatgcggctaggattgcggaggagacgtcaaacggaatctacaccggggcgtgtcatgtcctcgcgtgtgtaaggctgtcgcgtcttgaactcgatctgcgtgagatcttggaccagggggcggccagcgacacgcgtaaggaggtgatggaagaagtcggtgatctgggggagtctgttctccccctttttgaagagtaggacttcttgtatttcctagataatgtgtaaaactcgaactctgaccgccttcgtgcgtgcgattactatcccggcttactttggtatgctgacctcgggaacttttgtcctctgtagagatactgatcacgaggatgtccagcagcgcgggcagctcgagtcactggcagtaattccggtactcgagtttgaaccacacgtctcgcctgaccatgtggatcaaccccttgatatagagggaaggacggcgacgacttcctcaggttagtagtcccttcaccccttaatgcccacctgactaggtcagccatatcccgaaagagatgtatagcttgacttagtggttatcacgtttagcagatctcgagggtgtccttgctagccaagatcgttgtatccaatactggaagacgaagtttgaagtggcagagctcgagagaaccatgctggccatgaagaaagagcagactgtggaaacgctccgaggtcgtgaggtgtggtttaactcgtacttgaagagttgctgcacatccatggccagagtatgcagggagcttcgagtagtccgcggagatcccgaggagtcggcggccgggtacatctcgtggcttaatggggcctgtgcccaactcgatggaatcggaaagcgtatcgacgaggccttgaagcaggagtgtcatcgatcgagccgatatgctggggggcacgtgttggcttgcctacgagatcatcgcccgcgcctggacctcgaatatcttcgtgagggttttgctcgttctcgaaggactccggcggagatagaccatctggcaaggtcaatgtcgtcgttggccgagaagatcttctagtctatggactggcgttggccttcttggtagtactcgtaccctatgacaaatatcttaggaaaagatgtaatgtagcgaaagatttgtgaaaaaactgtaaggagtattttgtgaataaagaaatctatctttgacaaatgtctcttactctggatgtcatgtgtaagagtgcgttctcagttaacgactttagtcagccgtttgagtcgtacactctccctagcccccagccttgtcgtcggaggaattttctcggaggataaggctcttggacctttgacctgccttggttgaataagctttgatcctagcccccagccgtgaagttggaaagttaatttccgatttcacggcttggttaatacgcacggcgagaactcttacacgaccagatcttatatggtctttcgtctctacaggatctgacaaggccttatcggctctgggcgtccccagccgaagatcccttaggttcctcagaggccttgtcgagacggcgtaaagggacataaggacaggtttcaacactaggtgtcatcagagtgagggatcatcgggggaaacacgttgattgtaatatgggcctagaaatagcctttattaatactgtaagggtgcttacaggtatggatggtattgactcatacatagaatttacgtagttggtcaatgttctaagaatttgctaattcacgaccgtcgccgtctacgattttgaatgcgcctggctgcaagacttgtgtgatcgtgtaaggtccttcccatttaggtgagagtttgtttcgccctgcttggctttgaactcgtcggaggacatagtcgccgatcgaaagtatgcgtgcacggatgtgcttcttgtgataacggcggagggtctgttgatagctggctgctcggacggcaactcgttcccgatgctcctcgagaagatttacatcgatatctctctactcctcctggttcttgtcggagtacttctgtactcgtgtactctgatgttgtagctcgcctgggagcatggtctcagagccgtacacgaggaagaagggtgtttccttattagacgttgtcggtgtggtgcgtacggcccatagtactgatgggagttcttcaacccaccttttgtcgtgtgacatgagcctgtcgtagacgcgggttttcattccttgtaatactatgccgtttgccctctcgacttgtccattgctttgagggtgagagaccgaggcgaagcatattttgacccccaacccgatgcagtagtcctggaaatcggcgctgatgaactaggagccgttgtcagttatgatgcggtgtggttgtccgtatctgcaaaatatccctttgatgaatttgatggcgttgtcggccttgatttcccccgtgggtactgcttcgatccatttggtgaatttgtcgatcgccacgaataggaatctgtagccgccctgtcctcgtgggaatggcccaagtatatctagcccccagcacgagaatggccaagtcagagggatagtctggagcgcttgcgcgggtagctttgtgtgtttactgtggaattgacaggcttcacatcgctggaccatgtcgcatgcatctttaagggcggttggccaaaaaaagccttgtcgaaaagctttgccgaccaatgtccgaccggcggcgtgtgacccacatatgccttcatgtatgtcgaggaggaggtgtctgctgtcgtcggtcgagacgcatttgagaagtaccccgtttggcgctttcttatatagatcattgccgaccgtacagtagatctttgctttacgggttattttctcggcctctgtatcgtcctcgggcaactcctcgctgctgatgaatttgattagtgggatgcgccagtcgtctgtggtttcgatgtcggcaatggcgcgttctgcctcggtgacctccgagctaatgtcgggggtgttcgggctgactttgccgctaacctctttcaccgatggcttcgtcaggatgtcgagaaaagtgccgggctcgagcgattctcgtctggacgcacgtcatgctaggtcgtctggctcgacgttgtccttgtggtagacgtgtcggacctcgatcccatcgaactttttctctagtttcctgacttctgcgtgatacttggataactcggagttagagcatttataatctttgtgtacctggttcgcgactagttcggagtcccctttgacgattagtcgcttggccccaagtgtagctgcagctcgtatcccggcgagtagtccttcgtattctgcagtgttattggttgccctgaagttgaggtggattgcgtgcttgaattgatctccggagggagacgtcaagataaatcatgcccctgctccttggctgttgagtgcgccatcgaacgccattgtccatgtttcattgtcgccttggttgtctaatttgttatctggcatagtccaatcggcaacgaagtcggcgagtacctgggacttgatggctgttcgtggcacaaagtggacatcaaactggctcagctcgactacccatttcgcaatgcggccgacaacgtctttgtttctcacaacttcaccaagagggaaagaggagacaactgtgactctgtgggcttgaaaatagtggtgtagcttccttgatgtcatgatgacagcgtaaagcaacttttggatctgtgggtatcttgtctttgcgtcgtggagagcttcactgacgtaataaactagtcgctgtactttctctctctcgacaacaatgacagtgctaacggagtgtggcgtggcggcaatatagaggaataattcttcattaggttggggagcaacaagtacaggggggtttgataggtagcacttgagtgcaatgaatgcctcttcggcttcctatgtccatacaaatttgtcttgtttcttcaacagagcgaagaaaggttgtcctcgttctcccatcctagcgacgaatctacttagtgctgccatgcatccggttagtttttgtacctccttgagtcttgtaggcgacttcatgttctcgattgccttgatcttctcggggtttgcttctattcctctgccagagacaaggaatccgagcagcttgcccgacggtactccgaacgtgcacttctcaggattgagcatgaggcgatatcgtcggaggttgtcgaacgtttcccgcagatcgtcaatcaatgagtcgcctgtcttggttttgacaacgatgtcgtcgacgtaagcctcgacattgttgccaagctggttgctaagtgcgccctggaccgtgcgctggaaagtattcccagctgttatcagtccgaatggcatcttaacatagcaaaataccccaaacggcgtgatgaatgctgtcttctcttcgtcctcttttgccatgctgatttggtggtagccagagtaagcgtcgaggaagctcaataactcgcaaccggctgttgaatctaccagttggtctattcgaggaagtggaaagtgatccttggggcacgccttgttgaggtcggtgaagtcgacacacatcctccattttccgttggccttccgcaccatgactggattggctagccactctggatgaagtacttctctaataatgccagctttgagaagtttgtcgagctcttctcgtatggcttgttttcggtctggtgcaaatctccgcagtctttgctttactggcttggcatcgggtcgcaccatgagtttgtgctcaatcaccttcctggggacccccggcatatcggacggctgccaagcgaacacgtcggcattgtcgcggaggaaggtgatgagcgcgagtttctatttctcgtttagtgttgccccgatcttgacggtcttgtcggggttggaactggagagtggaacaatcttgatggcgccgtctggtttcggcgtcttatttgtcttggtcactttcttgggtggctcagtcgtggcgggtgggctgggcgtttgctcgaccatgtcgaggctccgcttgtcgcattgcaccgccagctttgcgttcccctaaatagtgattgttccctttggtcccggcatcttaagcacttgatatgcgtagtgagatgcggccatgaacttcgcaagtgcagttctcccgatgatggcgttgtaagctgtatcgaattcagcaacatcaaaggtgatctgttctgttcggaagttgttggcttggccgaaagtcacgggaaatgtaatcttgcccaaaggtctggacgatgattggggagtaattccgtggaagggttgatcagttggtgtcaactcgttttgcggaattcccatcgcgtccaaagtgctggcaaaaagaagattgattgagctgccaccgtcaatgagaactcgcgctaccttgatgttccgaatagtgggttcgaccatgatcggatatcatcctgggataacggcggtcttggggtggtcttcttccgagaactctatcttctgctcagaccacttcatcttgggggcagccccctgccatgtcgagcagacttcacgttccactttcttgtattctcgcttagaggagtacgttgtggaaccgccgaagatgtgtgagacgtggaggttggagtctagatacgctgagtccggttcgtgaggagccgtctcttcgttcgtctcaacaacgcgtactcgcttgcctttttcaaatgccatgtgcttctcgagcgactttttgaaaacaaggcaatcttccagagaatgtctgtccgtcttgtgtatggggcaccatgatttctttgtgtcgctgctttgtgggtctgggtgtttgggagggtttgcgtattctgctgcgaggacttccgcttgagctttcattttcccgtttttgcgatttttcttcttgcttgactcagatgtgtccgtggctggtttcttctctcccccggtcttcggcctatcgttcttgcgtcttagcacaacattagcgtgggcacatcgctcaacgatctcgaataatctccgagtgattgtgatgcgtcttgtcgccaactcctgggtagtgtagcgatctctgacaccggatttgaaggcgcgaattacaaaagcgtcggtgatttcaggaattgtgtttctgcactcattgaaacgtcaaacatattccctcaatgattcacccgagttctgtgtcaacgcgtgtaggtcgtcttcaatcgcgtggcgcttgtatgttccttggaaattggcgatgaattgttgccacaggtctgcccacaaagagattgagtagggaggaagatgcatcagccatgaacgtgcagaacccttcaacgcggttggtaaatagttcgctatcgcgttgtcgtctgctccggcagcatagagtactgtggagtagacttgaaggaactcctctgggtcggtgctcccatcatacttttctattgctccgggtcggaatctctcagaccatcagacatcacgtagggaacgaccgaaagccctacacccagcgttggggcggtgggttgttggcgatcgtgtgtccttcgtggatatctgtctgacgatgaggaggacgcggatgatgacgatgacgatgggtcacttggttccggcgtacgattacgaggatgacggcctggatctcgagaatcctgtcgtcgtcttccactgttgtctcggcgccgatctccatcgtcgtcgtcgatacggtggcggccatgaccagtattgtctggcacccgtcgttcgcgatcgttgtgatcgtggtggttgtcgtggtcccggtcctcgtttgagcagtctcctcgatttccgttatcatggcgccgtgaagagacatgacgtcaagagcgattcacgttgtctcgtgtgcgtcgtgcttcccggcggccgttgatttgatctcgaagatcgccagtgccgcgaggtgaaggggtagctcgttgaggtgattccctccgttccggatcttcactattggcctcgccagttggtggctgctcctggtgtgctgcggtagcggcttcttcaaacgcgttgctgaggttagtcaccgattcccatagtcgttctatccaacgctcgaggtcaacgttcagaacgggatcgtaaggagtttccctcagtatcgcttgaacgggcctgatgtgctgggcttgagtagtcgattgtttccccgcttctgcgttggcgtgcgctgacgtgccaacatcatcgatagccaatacctcccgcggcgtgctcgttgtcgatgacccatagtcctcgaggagatgtaagaccgatggttcgtgaggatcgatatcgattactccaacgaatcgatctgaagttggagtcactccttgttccttgtcattatccctgatggggacatatgacttaggagactgagctttcatggcgccgagaaagactttgcagctcgagaggtcctgattctttgtcttgtgaataggacaatagacatcccgagttggagaagtacgctgaattccacgttctttgcaggcgcgaatttcagcacggacgttgaggaaaacccagcaatcttgcaaggtgtgtttcttggttttgtggataggacaccaagaccttgtggcttcggaagtcatctttgtcggctcgtggttcatgtcggaaggacaaggtttggccgtatcagaatccctcttgagcttggatgtcgtcgatattccgttctccgtctcgacgagaggattttttgacatggaatcgccttggttcgtagccactgcgttctcgtctccggtcattggaggaccggttgagatcggtgtcgtggtgtaaaccgggaagacgatttcgccgacttgagtccataccagcattgttgaagcagggagtacttggctgaggctggtgctgacgttgttgtcgacgaagctggatgacatagtagtagaaccttaagtaccaaggccccctacctagcgcgccactgtcgacgggtgatacccgtagactggatatagagggtattggggtacgttgatacaaggatctacgtagtatgacatcaagcaaacaaaagacaagaattatactggttcaggccccttgacaggtaatagccctaatccagttgatgtgggattatatggtaaaaaacacaggttacaaagagaacaagggaacttgtcggatccggcgagattgtagtcgagttgattcgactagctctcgatgacttggctcctcgcaagctccggcttcgtaggctgtggaggttgtgttgggtctgagattcgatcctaaaccctccccggggggccccttttatatcgcagatgtggaggtctcctcatagaactcggaggtatcagaccctatacgatacgccaacgacccagttctgcccgagtaggattcttcccatctgtagattccgtgaaaagtttccttaggatatacaggaaatatccgcatgcgcgtgggtatgccatatcgatatgtaacgtatatcgaagggtaaatgtcacgaccggaaataacccaacgggcgttccttacgtgcgtgtattattccttgtcccaggaggcaaggtacaccaaaagttgatacaatacagagtttaacaagcggaagtgtaaatagataatttattacatgggcggcgaaggcccagcacacaggaagacaaacgaaaaaaacagcggaagactagggcgacgaccacaggcgcttgacggcaggcacgagctagacaccaaagccttcatcttccaggaactcctcttctgggtttgggaaaaattgagcaagactgagtacaaccaccgtactcaacaagacacacccacaagtgcagaataaatgcaagggagtacaagggagttataacatagggggttagggtttgcagtaaacagcattaaaagacacttagttgctcaaagctattttgtaaatacgatcctagagctatgcaatattattaatcaaggccgtgaacccacacgaacctgccttaacccaagacctacgatgattcagaccgaactggcaacccgaccctgggtcccagctcgtcccaagccaacccaggccaaccattccacattttagttgttaagcaggttttaagaattaaaacactaacttgggtacattgctaggcttgcctataaccgagggcgcggctattcgaataggttatactctaatcagaggtgtacatctttacccacaagacacatcttcctcacgtgtaaccacgtgccacataccaccacggtatacggacggaagacgtgacatagtttccaacccatcctagccatagacaagagtaccgacccaaccccacctacggccggaacctctgggacaggtaggcaggactgagcccctagcagcaggacaccagccctgtgccatgacatctcgactaccgggccgcagctcgtgtagccttcatttgccctagagatgtccatcgacccctgacttcgtccatctccatccgtgtacttttgtttataaccagactgagccacaaactaagccttacccactagacatgtggaagtacggtagtgctttgcaacataggcccgaagaccggtccttatgtggccgaggtgctacaatcaaaaccatgcaccccgagcccagcctaaaaccattttgaggattttgaatagagggggaggtgtgaatccaattccacaataatccaaccattccatagtgtctaggtgatatgaacattcccaaagtctagagttgtaaaaccacctaatgttgcttaattaagcagcgaagcatctacctaaattcatactagtggtaccatgcatagggtacctactagttgggggttttgtttagtctagggtgaacaaggtaataataacaatagcaataataattaggtcataacaaaggtaaataggcatggctaaataaaacagtgataacgcgggaatttaaataaagcgataatgcattaatttaaatcaaaataattttataaactgggattcaatatgttcaaggatgatgtgacttgccttgatcactttcccaaacgtcggcttcaaccttcacgaagagcggatcttccgaagctgcagcgtctacacgaccaatggaaaggaaaaaggcttttactctaataaactccatataacaagcaggaacaaagcacaaaaatgggttcttgacttcttaaggaaaaattagagacttgaacggtccaattccgagttcaaatggccaagttatggccatttgaagtttatatgctctttaagtgaatatttgcgaatttcttcatttaaattttaatttaaaaatggtttattgcgtcagccgaggggagagggcgcgcggaccgggtccatgggagtggggcccacgcggcagcctcacggtccacggtggaccgggcgctcccgggctcacaccggcctgcgccgtgggccccacgcgtcagccgcacccgagggcgtaggcggctgacggccgggccccacgcggcggccactcggcgcgcccgaaggcggccatgccggcgcggtcggcgggaggcggcacctgcgcccctatggtcgccggcggcggccataggcacggcggagcagcggccgagagaggggaagggaagggggaaaagaggcggcggtccacggctcaccctaggtcgacggcgacgacgaaaaaggcggccggagcggaggaaggcggcggcgcggcttgggtcgacggggacggcggcgctccggcggtcggcgagcctgacgagggggtggacggggacggtgacggtgcggcgaagccggagaaggcgacgccgaggcgggagacggtcccggcgagcggagagggccggccggaggtcgtctgcgacggaggagagagagggcgatggcgcgagctcgattccggcagggagacggtgcggcaaggggcagaaacaggcgagggaggcgcggggagggtttaaatagggttggaagggggagagggcggccgggagaggaaggaaaccggccgggaggtccggccgccatcaatggcgccggcgagatttgcgggagcaaatccgcccgtttgtatgcgagagagagagagggaaaaatggggggaaagggggaggggatcacggggaatatttccccccactttattgcacgcgggaacggccggaggcggcgggattcgcggcggcggcggcgctaggcgcgggcgaggcggcgggagcggcgggaggaaggagatgacgggtgggccccacccgtcagcgagggtggcaggcggacccgcccgtcagcagcgcacgcggggaggggccgtgtgggccgcgagggaagaggagagagggggagggaagtgggccgagccggcccaagagagggaagggggatttttagggtttttttttataaaacctttttaactttgtttatttcttaacaattattatttgtgctatgaaaattccactaaaatttatttacatattttaggcttttaggaaatatacaaaaatcctctaagccttatttgacttttactttgcacattttaatttttggaggctttcacacggattttaattattctaggcataatttagagaatgtattttagggtcgttttgggacgtgacagtaaagggtaagcctaacccgtaaccctaacaaatacggcatataaaaattgttaataaaacaccaaatagaatcctaatgacgattaaaaggagggacgtcaagcaggccataaagcaaacaagtaaagcggttgccgggacttctagaaagtataaagaaaaaaaatccacattgataatcattttcgatttttaaaatctcaatgacaataaaaaggagaagcagcgagcggggtgtataagagtatagttgcagagcctccgacggttgacgggacttctagaaaataaaaaatgaattgcaacgatagttatgttcgatttttaaaattacaatggcaataaagagtaggcggcggacgggctgcagaggggcatagtggcatcgtttgatgagacttttaaaaattataaaaaatgaaactacaagtctaatttttaaaggttcggaacttctaaaaagtaaaaaataccaatgataatcatgttcaattttgaaatctcaatgacaataaagaagggaggcatcgggcgagccgtagaggagtacaatggcaaaaccgctgatggtttggcgggacttctggaaagtaaaaatgaacccaaactataattatgttcgatttttaaaatctcaatgacaataaaaagaagagatagtggacgagatgtatatgagtataacgacaacgtttgacgggacatctagaaattataaaaacgaaacccaacgtgacaataaactctaaaaactataaaatccaatttttaaaggtccaagaatgaatagaaaaagtgatagatcgagcaaacaaataaagaatgagatgacataaggggtagcaactggtgtgatttttaaaactatataattagaaacatgaggatgaggatgataaggtttggtctttcaaagtgttaacaatgagatagctatttaataaatttcaaggaaatcatacttaaaaaaatatatgatttttttgctagccgcgcaattgcgcgggccacccagctatttatattattaaaacagctttgaaaggaggcaccacgttcgctctgggggctaaaaattttcacattaatcggagaaaaagaaaataaaataaaatgagagtccaagtagaagtacaatctaaaaataattgaaattcggaattaaaaataagcaatattgaaaatagtttctatataagaccccaatacgagattaatcaaaattcgaaatgaaataaaacaaaatccaaaattagaaaagaaaaggagagtccaagtagaaatacaatttaaaaatagctgaaatttggaattaaaaataagcaatattgaaagaagtttccatataagaacccaatacgagggattaatcaaaattccaaataaaaataaaataaaatccaaaattagaaaagaaaaggatagtccaagtcggaatacaattttaaaatagctaaaattcggaattaaaaatagggaatattaaaagaagagtccatataagaacacaatgcgagattaattaaaattgggagtaaaaataaaaataaaatcctaaattagcaaaaaaaaagaatagttcaaatcggagtacaatttaaaattagctgaaattcggaattaaaaaaaagcaatattgagagaagactccatataagaacccaatacgtgattaattaaaattcagaattaaaaaaataatatccaaaattagaaaaattaaaagaaattcccacattaatcgaagaaaaagaaaaaaaaagaaaaggagagtccaagtataagtacaatttaaaaatagctgaaatttggaattaaaaataagcaatattgaaagaggtttccatataagaacccaatacgagattaatcaaaattcgaaataaaaataaaagaaaaagaaaaaaaagaagagtccaagtagaagtacaatttaaaaatagctaaaattcggaattaaaaataagcaatattgaataattttccatataagaacccaatacgagattaatcaaaatttgaaataaaaataaaataaaatctaaaattagaaaaggaaaggagagtccaaatagaaatacaatttaaaaatagctgaaattcggaattaaaaataaggaatattgaaataagtttccatataagaacctaataaggaattaatcaaaattcaaaacaaaaataaaataaaatccaaaattaaaaaagaaaatgagagtccaagtagaaatacaatttaaaaatagttgaaattcggaattaaaaataaggaataataaaagaagagtccatataagaacccaatacgagattaactaaaattcgaaataaaaataaataaatctgaaattagcaaaagaaaataaaagaagagttcatgtaggaataaaatttaaaatttgctgaaattcgaaattaaaaatatgcaatattgaaagaagaatccatataagaacctaatacgatattaattaaaattgagaataaaaataaaataatacctaaaattagaaaaattaaaagaaagttcatgtagaaatacaattttaaaacaactgaaattgaaaataaaaaacaaaaacattcaaagaatacaatatgatattaactaatttttttaaaaaaattctgaaatttaaaaaagaaaaataagatatcaattaggaatacaatttataaataactaaaatttgtgataaaataaagattattgaaagaaaagaccatctaaaacacatgacaaaagttcatgtaggaatacaattttaaaacaactgaaattgaaaataaaaaataaaaacattcaaagaatacaatatgatattaactaaaatttttttaaaaaaattctgaaattaaaaaaagaaaaataagatatcaattaggaatacaatttttaaataactaaaatttgtgataaaataaagattattgaaagaaaagaccatctaaaacatatgacgagataaattaagtaacatgcctataaaggagtagagtggtggcggttgatacgagatataaaaattgttaataaaacaccaaatagaatcctaatgacaattaaaaggagggacgttaggcaggccgtgaagcaaattagtaatgcggttgccgggaattctagaaagtaaaaaaaaaactcattgataatcatattcaatttttaaaatctcaatgacaataaaaaggagaagcagcgggggtgtataagagtatagttgcagagccgccgaaggttgacgggacttctagaaaataaaaaaatgaattccaacaatagttatgttcgatttttagaatcataataacaataaagagttggcggcggacgggctatagaggggcatagtggcatcgtttgatgggacttctaaaagttataaaaagtgaaactacaagtccatttttaaaggtttggaacttctaaaaaaataaaaaaaaaacaatgataataatgtttgattttaaaatctcaatgacaataaagaagggaggcagcgggcgagccgtagaggagtacaatggcaaagctgctgacggtttggctggacttctagaaagtaaaaaatgaacccaaacgataattatgttcgatttttaaaatctcaatgacaataaagagaagagacagtggacgggccgtagaggagtataatggcaacgtttgacgggacatttagaaattataaaaatgaaatccaacttgacaataaactctaaaaactataaaatccaatttttaaaggttccaaaaagaatgaatagaaataatggtagatcgagcaagcaaataaagaagaagatgacacaaggggtagcaactggtatgacttttaaaaactatataattagaaacacgatgatgataaggtttagtctttcaaagtcttaagacaatgatatagctatttaataaattttaagtaaaatcatactaagaaaatatataattttgtttgggtgctagccgcgtaattgcgttggccacccaactagttgcttatattttaggacggaggtagtaccctataaacatatacttcattcgtcccataatataagagattttgggtggatgtgaagcatcgtaatacaatgaatctagacaaatgtttgtccagattcattgtactatatttgtcacatctaccacctgattccacctgtcatacacacactatgtcttatagtctacgctgcagctgtctataaatctgtaactcgctactcttatctcttctcatctcttctcatttatattatcgatatgtgtttattatattatcgatggtttataatctagaattgtacctgctctgacatggtccaaaatcgtactatggtaacaaaccatgaaaccaagtccagatatctatgctgattcgatgcacacaagtacagactacattgcatccaacatttcctcgtctttccattgcattttgtggagagatacaagcctagattacatgtagttagcctatggcaacccctgtccgagattcaggttgataaaaggcaacattgacagccactcaactctgaacgtattcgagttggggataaaattacaggcaaagtaaaaaaaaaagtacaaaagttgttatcttacagattatacaatactatatcgacgagtaaaaaccagaattgctcttccattttctggaaaactaaagtggtctcgagcaacatcctaacagcaggacatgcctcttcttcccgccttaatctcatgtcagatttgttatttgtcacctacgaatagtagtactgtggcgtgacgtgtccgtgcgacgagtcagttgtcacaagcacagccttgtcagctcaccgtcggcgacggcctcctctcctccggcggcctccgatcgcagcagctcgctctccgccgcgcacctcttgtacggcatgaagcccctctgcagcagggtgacggacgccgagctctcgcacttggtcagccgtggcgaggccgccgcctccctgctgttcccttggccacgggactccgcgacgtccgaattctgagccgccgccgccgccgccggtaccgccgccgacgatccaagcacgacgctggaggccgtgttcgagcccgtcagcgatccttccctctgcgagactctgaactctacgccctctgaatcacggtggcactgctggttcgcagccgccgccgccgccgggtagaacagcgcgcatggaaggctcccgttgtagctcaaccatggcatgacaggttgcgcggcgaaaccatccgatcgaggaaggaagtagagaaactgttgcatgctgctcggccatggattcgacgagctcccttctggggcagcagcaaaagaaggtactagtatgtttctggttgctctctcaactgaaccactcgttgcaatgttactgccattaagcaggtgcagctggtctgaatccttaaccactacgctctttccgaatagcctgaagactgatgcttctgaggatgcttctttggcatccgtggttgcaattgacatctgaaattcacattcgaaaaacaaaaacagaatttattaagggtgccaataacactaaaagggtatggttatttttccattggcgacaatagatcaaattaataccatgtaaaactgcagatgatcagattgcatatcacaatttgattcagagatactcctacctaaaaggctaaaaaaacctgtgtttctctgaaagtgatgtcagaaattctcgactgaaattattggtcctaaatattgcttttctgatggggaatatcttgtattcttgcaaaattggaagaactaatgccttacaaagttgtccaacatgtgctgcccacgaaagaatataccttagtatttggcgcctgcatagccaactcagcagtcgggatgctcggtgagaggcacccgtcctctctgtccaccgacgacgccggcgagccgccaccgtcgacatgctcatccgtaccggcggctgacggagccagcgacccgctgccgctcgagttattcgagaacccaccgcccagggcctcggtgcctatctgcgccgccgtcagcaccgacgtcggcgagccctcctcctgctcggacagggactgcatccacaacggcggcttctccagctgcctgagcgccgggacgtgcttcttggccgcgccgtccaccttgcgcgggtacgggtgcgccggcttcctcttcggccgcggcggagggatctggatggccgccgccgccgccgcggcggacgcgccgcccgagccggtgttactccccgaagattctctgacgacctgcagagcaccgcgcaatcacagcgtcaggaaactctgtgaaacaacccgcagtaaaaacatgacatcatctgttcttctctcccatgaaaaaaaattgaaaaattggcgacttactttgggcaatcaagtaacacaaccaatggttttttttttttcgtttgtttgttttttcatggcagagatcagagattttttgttgttgtttacatgagaacgaaaggctgtacgaccttagagaagaacttctgcgcgtggctacggatttgcacggcagtcttggtacctatgtgctctgcatccacacacagacgaacacaaacgttacggcacacaggcgaatacggacaattgcgatcgatcgccatgaaaattcgatctgttcgatgagacataccttgtatacggcgccatgcgcggccgtgcagctgcagggcttccaagaacagcctgtgctcctcgtccgtccacttctcgcgctgcttcgtgatcgtgtacggctttcgcgcctggtcgggggcaagcgtgcaaggaaggaacacaatcttttaagagggaatcgagcagccaacgaactcaagcacacaagaaccgcacgggattttgcagcggagaagccgcgattcggggggaggagtaatttacctttggcacgtgctcttcccctgacaaatccatgtcgccgtagttcatatggctcctgagatgatccacggtgctctcgccgccggcgcgatcgtcggcaccgttttcgtcggttgccatggcgtttccctgaatagcacagaacggccacaaaaagaggggaaaaaacagcacacggtcagttcccagtaacatcatttaatccgaaaaacaaagttcattcaaaaacgatctcgccaagaaaagaaacggaaagatcaaactcaatttaccggcaaacaggccatctccattctgaaaaaaccgaactcctcccaaaccaaaccacactccacaggatcgccacaccaaagccaaaaaatcagcgcctcccaaaccccgcaatctttgcgagttttctcctcgatgttgttgatgaggacgacgagatggggggagatgaggaggagaagggaacgaggaggcaaagaagcgagcgttacgtaggccccgtcgcactaggaggagggaggaggggacgggagaaaaagagcatggcgagacgcgccacgtaggactcgattttttccgccaaactttttccctcgttttttttccctcttctcttttcttttggctgcgttttttccccgtctctttttctcctttttctttatttttttccccctataccttcctcgcgcgaaaagaaaaataaataatccggtgggggaattcgggaagccgctcgttcttgtggctggggatgctcctccggcaacctcgctgtcatgtgttgctaatgcgccattagtaattgcccccgctcactaaacttgacacgcgaagataacttgcagagtagagtagtagtagcgacgaaaaagagtattcgttttcgatgacgagcatcatgtgaacattcctaaatcaccaagggctaaatcttatctccccaagattaaaaagggccaccttatcgtgatgccacgtcaacatgtatggcaacacaagcaggagcagcagtactctcttttatcgagcctcacagaatacgggattgctagctagctactcctaccttatcctgcacggagtacagatacagatcatcgaggaattggagtattttcctagtaaaaatccttttgaaaatccgaggaaatatctcagcctctagatttggagcggcatgcggccgcaacgaccgaccgcgctcgtgtggacgggtccggtcgcaaagatcgccgggtgggggcgaggactttgggactttcgctgcgcttttttgacacgtcaggccacgccgctgctagcgaccgacccgagaggggagccgcaatccaccaccgaactggtggtgtccggggccgacgcgcgtcgcgcctccggaagccgcgcgagcggggagcggatagaacgatagtaaaaaccaaggccgcctttcccgggttgctacaaatgggcgcctcctggccacaaaggtgtggggcgcgcgccagaaaattcacgaaaaatcgctggccatgtgtttttgttgctttcttttctcccggtggatgacgcgtggggccatggcgggactcgtccgaggcgcaacatgtggcagtggttgtcttggtacaggggcacaggggtgggccgtggggtgggggagggggatgacgtggcggggagtaaagaatagcgtcgtgcactcggtgcttcgtgggctctcagtcctcagacggggacataattcggtccacgtcatcagatttgttgggatgcagttaatctggatgcacttttgctgtagtcctactccctccattccaaaatagaataagttcacttcatgaccctcaaaagagacccgaatctaatccatgatcttaaaccgcaaaaccggatatcttcacccacaaactattgaaaccggtgcaatttgactcccttggtggctttggagggtggtttcgctgacgtggcgctgacgtggcggtgttgacctagtctgtgtgctgacgtggcactgtggtggcatttcaattaaaaacatatatgtgggacctatttgtcattcacacacacaagattgtgaggcccactgacatgtgggccctacctgtcatctcttccctttcttcttcctcccggacctcccctcctcctcccttctttctttctgttctccctctccacttcgggcgtttgcggggagcgagcggcggtgggctggagctggcagcggggggcgtgggccggattggtggcggtcgacgagagctgaagcggcggcgggctagagatgacgcgagagaggacggcagcgccgacgccgacgagattgagcgggggcacggtggtctacaggccggctacggcttcggatccatccgcatcgccgggatcagagctcctcgtcgccgtcctccaccacctccccgcatccatcctcgcatcgcgcgggacgtcgacggcggcggtgggcacgggacgtcgacgacggaggcatcgagtggcggctccggcggcgtgcgggcgagcacgagtgcgggaggaggcaccggcggcgacagcacgagctcagcggctccggcggcgtgcgggcgagcacgagtgcgggaggaggcaccggcggcgacagcacgagctcagcggctccgcttctcccctctcccttcctgccctcacgcgccgccgccgcctctcgtgtaacccaccacctccgttcctcccttacatcctctcctctcctctctccacttggcgaggctgatagcgaggctaccgccgcagccgccgctgctctggccccgccggccggcgctccagctccagccgctcgtgctccccgtggccagccgaaggggagagaagagaaaaagaaagaaagagagaagggaggaagaagaaagggagagagaggatgacatgtggggcccacatgtcagtgggccccacaatttttattttgtgtgtgaatgactaatgggtcccacgcatattttttatttctaatgccacctaagcgccacgtggaaagaagaccgagtcaatactgccacgtcagcgccacgtcagcgaaaccgccctccaaaaccaccaagggagtcaaattgcaccggtttcaataatttgggggtgaagatatccggttttgcggtttagggtcatggattagattcgggtcacttttgagggtcatgaagtgaacttattccttccaaaatagtgtagttttgcatagttcatgttcaacgtttaaccgttcgccttatttgatttttttatgattagtattattattattagatgataaaacatgaatagtactttatgtctgacttttttttaaaaaaatcataaatttatcaaataagatggacggtaaaacgttggacacgaatatccacggctgtaattattttgggacggagttagtactagattaacttattctaaaacagagaaagtactctctagtatcataggactacaactatctcaaaatgtaagcattttttttgttgacataggcattaaaaatgttactcactccgtcctaaaatgtaacaacttttggctattaatctggacaatatagtttgaattagaggatggttgtaattggttgagaatagaaaatactacctccgtcctaaaatataacaacttttggctataaatgtggatacacagttgtccagattcataactaaaaatacttatattttaggacggagggagtagtgaaggaaaatagttgtgaatagtagaagggaggagataggtattaaacagataactttattttggaataatgtactgtgttaaaaataaactatattttagaacgaagatagtagaacgaagatagtagtactttaagcttattttggacagaataaaatggaaggaaacattgtatggctaaatggtcaaatgattaaaagtatatttcaagccctatcaattggtttaataagctaaagcaaaagctaaaatttaagttgattttaagatatttttaatgtatttttttatgttggcttttaagtcgcagagcaaatatacaattttttaccaataaattaatttttatttcttaataaagttgttttaacttattagaaaatatggccaaccgatgattcttttcatccaccctacaaacgagccgttctaccaataaaaaaagtcgctggagtagtaaatttgatcggagaagtgagaccatttatctattggggcatttgcaaatttgccaccggttttttgaatattgcaaggataccactcgaatgacagttctagtggcatttttgcaattttctagtggcagttttgcaataacgattcaaagtagtggtaaatttgcaattgccccttatctagtctattccgtcaagttatttggcaatgtgttttagaaagaatttattaattaattgcatgcaatgattctgtataacctgatgagtgcgtgtagacttgataaaatggcaactgaatcgaattgacgggagcaatttaatcattttggcatgaagataattttgctgaggaatctaaaaacatcaagatttttgggatagaggaagtaaacgaacaaaatagaattaaaatagcaccttaaagattcatatgcagaacgtttttttttaactttcgcagcattaaattatagctagagcgcgtattcctattatcttccgttttcagtggaaaagaacacatccgggatgcaggtgcatgacaggtgacagccgaagagcaacgcacaagggaaagctacgaaatggtgacctcccatcaaacatgggccgtaacccgtcacccgtgtatcttccatctgcgagtttgcatcgctctgaaaagcaagacgtgcctaggcagtcatgccgaatacgcagtgatcaaaacatgacgagaaatcagaaatatcccactcaccggaaggaggcggctcaatgaatgcgtcgagaatatctcacccatttgcgcctgcacgtctgaagaagaaacaaaagcacctcgtgatgctgcctggagtatatataaacggcacttctccaagatatcgaatggtacaggcagatatcttctagtatctgcacccgttgcttttatcacaacagcacatgcatgcacataaaaaaaacgggtagtcaagcacgtactacttgcgtgtcccgcggtttgggctgttggcaattgccatgtgcttccgcagttccacgatatagcaatatcgaatagaacgtatcctaatagcatgaatctggatatactccctctaaatttatatgattagaataagtctcatctgattttaaattgctatattctaaaacggaggaaattatgaatactagcctaccaaatactaggaataccagtagtaactcaatagtatttcctctgtcctaaaatataagcatttttagcacagtgataagtcaaacatttttaagtttgactattaatagcaaaaaaaaaaagagtaaagaacatcaatcatataaaattgatgttactagatttatcaataaacaaactatcataatatacaactatttttatttaaaatatcttacttttataaatattgttggtcaatatagcatctcgaagaccgtgccatgatctaaaaatacttatattttagaatagatggagtaagattgttggagtactaggctagagtggtacgaacaagttgccggcccttttctgttgctgtggcctaacaaacattcaaacaccaaccgtgagtcgatagtgacaaatttggcatatgaaagctcaaaaccacgttctcctttccttcatggattagaccaaacgtacggcgtcttagtttcacatatatagtgtgtgtttagttcacacgaaaattaaaagtttgattgaaatttaaacgatgtgacagaaaagttggaagtttgtgtgtgtagaaaattagttttaatgtgatagaaaagttgaaagtttaaagaaaaagttaggaattaaaccaggctataactgcagagaagcttcaaaattgctcatatatttgagatttttgttctgcctaagttgttagaactgatatttgacttaaacaaattaaaaacaatgtctcaagtggccttgttcacttgaaacaagattcataaataccagcaaatataactcaactagttagatttcttatatctattccaatttaaattccagatttaatatgggtgatcatttttctgagtaattatatttttttgatagatgatgtccccgtcaacagcaagacacttattataactttgtcaatctcaatatatatcggtccagtctctcggagatataggatgtgcacaacgtgtacatgtgtatgtgagcacatgcatttgtacttatctttttttaaaagaaaattatctatagacatgtaaattaacgtgttaagtgagtgaactgtgatcttttaaataaagggaataaattcggccctccctttagacagtgagaattatgtcgcaataatatttaagattggaaggagagtgcttttcagatacaatatggtagtaataactttagaataactagatgatttgcccgtgtgttgccatggaatattaaaaaatatattttgattcattttaaagcctaaaaatgtccacctataagccattttttccatcaatttttggatgcttactgagttaggctgagctaaaggtacacatttatgttgcttcgggatgaaacactaacactgccagcattgtgggcccacacgtaagtgaaaggggtgatggcgacatattcactactatatccaaggttgttagtatcccgatccgtatcgtaattaccaagtcgaaacaatatagtatcctaattttcatttattacgacacgatattacgaaattatagatagtatcctgattctacgattcttacgattctacaaaatattatttaaaataagatggtttgaaaaataacgtaaatatatatgcttaagtttatataaaaatcagttaaatatatcaaaactaatgtgatttctcttgataaagtctctatttgcatgatatatattattactatgtattttttattgaatggctatttgtaattaatacaaatcttaattaaacttttttaaaaaataaaatctcatagtatcttactccgatacgatgctatttcatactagcagtactgtatcagtatcaagctgtgcatgcgtcgttttcctcctgaccaatcacatccaccacggatatcaggatatgagtatatgacatgaagacgatccacgcttgcagcgccacgtactggtgtgctgctttcagtccgctctaaacggatcagacattttgcacccttctcttgctgatcagccatgggatcgcgaaggtgaagcagcgtggcagagtgcctcttcccgaacgcaagagtcgccctgcctctctctctctctctctcctcagctctgctcgactccggtttgacatttcggcgcagcaggcagcagctggagtacacttctccgacttcggcgatcgactgccgtgctggtacggcggggcccctcgtaccagcacagccagcgcgggtacggcctaccaccggaggcgcgcttgggtgacaggtcgcggacggcgtcggcgcgggggcagctgccgtcccgggtatggctaggagcggtacacgtattgttgagattatgggcatataatgatttaatttattccataaataaatcatgacattacagatgaaaactagcatgaacgcatcattagatctacacatgtaaactacgcagaataacatgaacagatcaaatatgcgcaacatattgaacacgtaccgaggtgacgaaaagaccggctgcttggtcgaaacttttcgcaggtgtctacgaaggcacgaaacacgcgagcgaagaggaaggcgagccgtcgcgaacgaacagggagcagtcgcgcgaagcgcttcccaaaaaccttattgccgccttctcccggtgcaggacgtcaaaggcagaggttccggagacctgctctcccgatcgctggtgcacgccggcgagcgggatggagtagtctacgagcgacggcgcagtacagagtaggaggcaaaccctagattgattttgcatatatactgcgtgaagacggcgggtcggtttatatagagaagggtcgcttgatcagggcgcccgcacgatctctactgcgcgtaaccgaaccggataagtcgcgcgtaacttatccggactccacgccgtttgcacgcaccggatttttcggaacgtttccaaaacaaaaacgaatccgaatttgcagcaaaacaaaactgcaaaaggaggctgcatctgcgcaagggtgaggagccaatttttcggaccattcgacgcgtacgtcgtgcacgcgcgccgcctgccctgccaggccaggcgaggcgagcgagcgcgcgcgtgtgtttcccctcttctctccaccacacatgcttcaagcgactaggagggcatcatcccttttaaggaggtccccctctcctagaataagcaaggtggtactaaactccacatgcatgccatcccatgaggtgggcttttatgattttccaaagaattaatcttcgagtgggctaaggcccattcattaattccaacaatcccccaccaaatctcaaaatcccactgagatttgccttttccaatgtactgtttatataccagtggttcgatggagaccaattaaggttgaacatccacctagaactccaagctacacttactcacaacttgaacaatggactacgccttgaattgtaagtcttgtgcaagcaagtttcacttaaagtcttatctggtactagaccgtctgtagactacccctcgggtggagcgtataagtcatactcctaggtctttagtaagcttcctagaagattcacccaaaatcttcatagactgcgaccaacagtcaagctcacaaaggtgagttctttcaagaatgctctgcaggacaacatctttgctaattaaagccaacagaactcattaaggcatagccaacctgccttgcagctcatgagagttgtcggtgacatgggaccgggagtatcatgacttagagacttgaggcagacacgatcacccacgcggcctaaccccctcggggggggggggggggggtcgggcccgagggtgatacggccgcccttctctttgtctccccgaggggtcggaccgctcccgtctcagccccgagggtcgaggcgccccgaccccttgtgggttttgcgccgcgtatatgtggtaggtgagcatagcggggctcacctaaccacatttattgcggtttggacgagcgcgtcacgccgcatgtaacgcagtgcagcgcgctcgtttatccggtcagtgaccagtcacagaccgatcagatcgtgggttaggtggtgacaggcggtctgacgcacgcctcgccccatcccgtcaggatgagagcctccaatcactcgtccctagccggagccggcgtgttagctcctggagatggcacgttggtcccggtcagatatataccaggcttcatcctaaccattacaagcaagactttgtatgaagaggggcgaacatgcagattgataaactgacgcgtggtggacaagaatgaccgatttgtgaccggtccgacactggtcatgtcgtcagcagacagccatgttcccacgtcgcgcctgcttccgacggaagtggaggtaggtatgggccgtcccatcagaaggtcattcggacggcaaccatacaagtctccgtctgtttatgaaaagataggataagtccccacaaaaaagagagagatggtgcatgtggtatccccttgaggtataaaaggaggaccttgcccacttagaagggggattgatttttcggatccagaaggaccagagagggagagagtaagagctctctggttctccagctcttttgtagcttcttcatacacagatccaccagaacacaggagtagggcattacgcttctcagcggcccgaacctatatacatcgcccgtgtcttgtgtgtttcaattctcgcgaaccttccacacacagacaaggagcttagaatctcacccagggcccccggccgaactggcaaaggggggcctgcgcggtctcccggtgaggagccccacgctccgtcatctggcgcgccaggtagggggttctacgtgtgttcttctaagctctcgcactctttcgtgtgcgccaagcttttcctgttcagcccaatggctgaacaagcaaaggcgcacaacctctctccgagtgttagcggtgacgaaggggagccgaacccacgccgtcgagctcgtactccaccgccccctccacgccaaagtcctaggcgggaggaggcgctcgagagagtcgaaggatccgcgacttcgacatccacgggtgatggggaagggcggcgagatggggagcgtcgcctcctcgtctacggcgacggcagcacgccccagggcgcgctccaagctgcgggcgcgctcctacgtcacccgcccattgtccctgacccggagtctccagcccaacgttggctggacgacgtggccaacttggtcatgacggcacggcagcgcctaggtgctggtgggcggtcctccgccaccaaaacctctggcgctgctaccaccggctccgtgtcgtcaaggcgaagggcgcggcgagcggcggcggttgctcgccattcggccgccactccttcgtcaacgcctccgacccaggaagatctgcgtggggtgccggatgcccgcatcagtatcgagcgccggcgtaatggccgacgtgctgcccacgcaacggagggcgcctcctcgtccggagtgtcacatcaacacggacgcggggatcagccctccgtgcccccggttggtggtgtcggctgtagagcctttgtggcgagccttcggaacgtccattggcccccaaggttccggcccaccatcgccgaaaaatatgacgggagcgtcaaccccgtcgagtttctccaggtctacacgaccgggatcgaggccgccgggggtgacgacaggatcatggcgaatttctttcccatggccctgaagggacaggcacggggttggctaatgaacttgccacccgcgtccgtccactcttgggaggatttgtgccaacagttcaccatgaactttcaaggcacatatccgcgcccaggtgaagaagcggacttacatgcagtccagcgaagggatgatgagtcacttcgctcatacattcagcggttctgtcaagtccgcaacaccataccatgcatccctgcacacgcggtgatctacgcgttcaggggggggtgtgcggcacaaccgcatgctcgaaaagatcgcctccaaagagccccagactaccgcggagctttttcagcacgcggaccgagtggctcgtaaggaagaggcatggacctggaacccctccggttccagtgtggcagcttcggccgcccccggatccgctgctcggacagggcggcgtgacaggaggaggaagaagaggtcagcccattccgacgacgagggtcatgtcctcgccgtcgagggcgtttcgcgggccacccgaaaggggaggcctgcgagcgacaaaaagaaggaggccggcgctcccagtagggagcgcccaaccggcaagtggtgcatcgtccacaacacctcccttcacgacctcgcggattgccgcgcagtcaaaactttggctgagcggacgaggaagtgggaggaggagaggaggcaggagcgccgagagggcaagtccccggcggttccttccggcaatcggcgaagtgaggccaagcagaaggcccccgccgaggacatcgatgacggcgatgatgacctaggtttccaagagcctggggccaccattgccactgtcgatgggggagcgtgtgctcacgtttctcgccggagcctcaaggccatgaagcgagagcttctggccgcggcccctactcatgaggcgacgcgccggacgcggtggtcggaggttgccctcacctttgaccagaccgaccacccaccgtgcgttgcccggggaggacagatcgaaatggtggtttcccccactgtttgcaacgtgaagctggggcgtgtcctcattgatgggggagcagccctcaacatcctttcccccgcagcctttgacgctatcaaggccccggggatggggctccggccgtcccagccgattatcggtgtgacgccgggtcacacttggccgctaggtcctatcgacctcccggtcaccttcggtggatccgccaactttcgcacggagcgggtgaactttgatgtggcggacctcagtctgccctacaatgcggtcctagggaggcccgcgttggtgaagttcatggcggcagtccactacgcctatctccagatgaagatgccgggccccggtggccccatctctgtccatggcgacctcaaagtcgcgcttgcttgtatggagcagcgcgcggaccacctcaccgccgcgtccaagcccgagggaggcgacgagaggcttggcacctccgcccccgccgccccgaggcagcggatagtcacatgcgacgaggtcccggttaaggaggttgccctgggcgacggcccgtccaagaccacacggatcggtggtcttctggacggcaaataggaagacgcgctcgtctctttcctgcgggcaaacgctgacgtcttcgcatggagaccggcggatatgcccggggtccccagggaggtgattgagcaccgtctcgccgtgcggtcgggcgcaatgccggtccggcagaaagtacggcggcaggccccggaacgtcaagccttcatccgcgaggaggtggcgcgacttctggaggccggattcatccgcgaggtcatccatccggagtggctggcgaacccggtggtcgttcccaaggcgaacggcaagcttcggatgtgcatcgactacaccgaccttaacaaggcatgtcctaaggacccttaccccctgcctcgcatagatcagattgtcgactccacagcggggtgcgaccttttgtgttttctagatgcatactctggttaccatcagattcgcatggctagggaggatgaggaaaaaactgcattcattacccccataggaacttattgttatacgacaatgcccttcgggttaaataatgcaggtcctacttttcaacgtactactcggatttctttgggtagccaaataggacgtaatgttgaagcttatgtcgatgacttggttgtaaagacgcgcaaccaagagaccttactctcggatctagcggaaacttttgagagtctccgctccacccgcataaaactgaaccccgataagtgcgtgttcggtgtacctgcgggcaagcttctcgggtttttggtctctacccgaggcatcgaggccaaccccaagaagatacgagctatagagcggatgcgcccccccagcaagcttagggatgtgcaatgcgtcaccggttgcatggccgccctaagtcggttcatatcgaggctgggagagaaggcgctacccttatttaagctcctcaaacgctccgggccatttacttggacggaggaagctgaacgtgccctcactcagttgaaggcgtatctcagctctcccccagttctggtcgcctcggagccaaatgaacccttgctactctacttagcggcgaccccgcaagtggttagtgcggcgttggttgtggagcgcgatgaggacgatcctcattccgcgcacccccaccctgtgctggcttggcccgggagagagcagggaggagaggcccccgagccgaacagtggcccaaggcccccgacgaccggagcaggccctctgcccgcttgtcagacggtgccaggtgcccccgacccccaggatggccagagggccactgcgggaaggccgcacctatcgccctctgaccccgaggataaccctgtgccgactcgacccgggagagagcagggagaagaggcccccgagccaaacggtggcctaaggcccctgacgaccggagttggccctttgcccgcttgtccgacgacgccaggagcccccgacccccaggacggccccgaggccactgtgggaaggccgcccctgtcgtcctccgaccccgaggtcgtcggcacagaagacgagtgcgccccgcgaggccgcttggacaaagagcgccccagggatgtggcccctagcgaagaggatcggccccaccgaaaggtgcagcggcccgtctactttgttagtgaggccctccgggacgccaagacccgataccctcaggcccagaagatgctttacgctattctgatggcttcgaggaaactgcgccattatttccaggcgcatcgggtcacggtggttacgtcttaccccctcggccaaatcttgcataatcgagagggtactggacgggtggtgaaatgggcaatcgaactttctgagtttgatttgcactttgaaccacgccacgctatcaagagccaggccctcgccgattttgtggcagaatggaccccagctctcgagcccgtctcagtccccgaggccagctcgggcccctcgcagctgcctcacaccgcccactgggtgatgcagttcgacggctccctatctcttcagggcgccggtgcgggggtcacgttgacctcgccgagcggagacgtcctcagatatttggttcgccttgactttcgggcgaccaataatatggcagagtacgagggactccttgcgggactcagggtggcagctggactggggatccgccgcctcctggtgttaggcgactcccagctggtcgttaaccaggtctgtaaggagtaccggtgctctgacccgcagatggacgcttacgtgcgccaagtacggcgtatggagcgccattttgacgggattgagcttcggcacgtgcccagacgggataacacggttgccgacgaactctcacggctcgcttcctcgcgagcccagaccccaccgggcgcttttgaagaaaggcttgcccagccgtcggcgcgacccgaccccttagaggagacggacgcgcctgacaggcccccgaggcccgtcggagtccaggcctcgggacccgaggggagcgctcccagctcccttagattgattgcttggatcgctgagatccaagcatacctcacagataagactctacccgaggaccgcgaagggagtgaacgcgtccagcgcatctccaaacgctacgtgctggtagaagggaccctctatcggcgcgcggctaacggaatcctcctgaagtgcattcctcgggaacaaggcgtcgagcttcttgccgatatccatgaaggcgaatgcggagcccactccgcctcgcgcaccttggttggcaaagcctttcgtcaaggtttctattggccaacagctctcaatgatgcggtcgacctggtccggcgatgcagagcgtgtcaattccacgccaagcaaatccatcagccggcccaggccctgcagatcataccactttcgtggccatttgctgtctgggggctcgatatcctgggaccgtttaggcgggccccgggcgggtttgagtatctgtatgtcgcgatcgacaagttcactaagtggcccgaggcttatccggtcgtcaagatcgataagcactccgcacttaaattcattaagggcatcacagcccggtttggagtgcctaaccgtattattacggataacggcacccaattcactagtgaacttttcggcgattactgcgaagacatgggcatcaagctctgcttcgcctcacctgcccaccccagaagcaacggccaagtggagcgcgccaatgcggaaatcctcagaggccttaaaaccaagaccttcaacatcctcaagaagcacggcgattcgtggatcgaggagttgccagcggtgctctgggcgaaccgaaccacgccaagccgagcaaccggggaaacgcctttcttcctcgtctacggcgcggaagcggttctcccatccgagctcaccctgaggtcccctcgggccaccatgtactgcgaggctgatcaagatcagcttcgcagagatgacctcgactacttggaagagcgaaggtggcgcgcggccctccgagccgcgcgctaccagcagagcctacggcgctatcatcagcgccacgtccgggcccgatcactctgcgtcgacgacctcgtcctacgccgcgtccaaacgcgtgctggattgagcaagctctcaccaatgtgggagggtccgtatcgagtgatcggcgtcccccggccgggctccgttcggctggccacgggcgacggcacagagctgcctaacccgtggaacatcgaacaccttcgtcgcttctacccctaaagggggatcgggtgtcaggtttcgggcttgggccaaccccgcacccccctcgggcgtgcagggttggccgggggctaccacatatgtctattcttatttctcttatatctgtatttcaataaaagcattttcgatttcctaaaggctgtatctgtgctattgtttccttttgaaggatattgacttgaaataggtcactcgtgttcaatcctgccctcgggggctcgggtcggctaaaatcgccaaacggggcccagaaccgagccgtgccccagggcgtggtgaactccgggggggaatcggcaaaaacccacaatcgggtaacccataaccctcggtcaccacgctcccggcctggccagtctcgacatgtggatctccccaggcactagccccaacccgagccatttgaggactaggacctgggcacgagcccttgttcaagccaagacacaaaaggaccgcggcacaggcatcctcgtctcatacacacaacaaatagaattgacacaaaaaatttcctctttatttgattgcagattaaattagtctatacaagaagggggcccgaaggactcggaagaagaaaagaagaaactatttaaagattggcgggggcctgggggctcactccgatgcacccgggtcaccagcctcgtcgccactgtcgcccacaccgccgtcatcgccctcctcgtcggagttgagggcgaacgcgagccgaggggccgaaccctcgaagctgtggacgatatggtcggcggcatcccggacctgcgcgcgcgcgccgtcctcggtcccgggagggaactcgtccagcgccgtccatggggagaagtcggggtccctggcctggtaactcgccagtacgagctccaccgctcctcgggcgaggtccctcgaggatgacttaatcgtcccctcgagttcctcggggagccgctggagagtcccggccatctccgagaggcgctgggcgaggcccccctggttggcggcgtacttcacagtccgcccgccccagagacccgcctgccgcccggcgcggtctaaacgggacacggcgtcgcgaagcatgctgggccctatctcgcctgccaggcgaagggcctcgacctccccggtggacgaatccagcgcgccctgcagatccgcgatggtgtgttcggcagctgcgaggcgggcggctaagtcgctgtcgcccgtggccgccccgccgctacgcgcccttgcatccagctcccttgcctgcgcctcgagttcagcggcccgctggttcagtgcggccctctcggcgcgggcactttccagattgcgacgcgcttgttcctcttgcgcagcctcgcggagggacaggctgtccgccagccgttgcgccgcggcctcggcctcctcgagagctcgctcccgctcggtgagcgcgtcctcgcggaggcggagcgcggactcttcttcggcacaggcggcttcgtgcaccgccagtgtgacctcccgaatagcaacggcggcctcgcgatccgccaggtccctctccacggcgcaggcacgctcttccagcgccatggcacgggcctcaagggcttcttcgcgccgccgggatgccacctcggtctccgccgcccgccgttctcgggcagcggcagcgtcaaggaccccccgggctgcgtcgagttttttccctagctccgcctcccagctcccgtattgaaggcggagggtgtcctgcgcctcgttcatcacggtggtggcgatgagggcagccccccgctcctcctccacctccttggcgatctcccccagcaccttccgacggacttcgagctctgagacgtgctggcggtgtgccttgcggcccacctccaccatggcctccaccgagcgtcgcccctcatcgacacgcacccatgcggcgtcgagctccgcccgctctgcttgcagggcctccacctgggcacttaacccgtccaacactgtggtgtttgcgacggctaaggcctgcagaaggggttctgcgctcagtggagcaacggaaggcgtggggaagagccgcctcgaagaggatgccgcgcggcttggcccgccgatggacgtgccggactcagggatgtcccccggacctggtttgatctgagcgtcgcacgagggagtgggcccaagcgatgcgcccgcggcctcgtcacgagttgcctcggaagtcgtcgtcgcctcggcctggcgaagtctggcctcctcccgagcggcttcttcagcttggcgagctcggacggccacctaggcagcttcctcggcttctcgaaggcgatccgcggcctcttgcccgtcagtttcacgggtcgcctcggaggatgtcgtcgcctcggcctggcggagtccggcctcctcccgagcggcttcctcggtctggcgagcccgggcggcctcccgagcggcctcctcggtttctcgaaggcgatccgcggcttctcgccggtcagattcccgcctccgggcctctatggtcgccgggtcctcggcctcaggctggccggacttggaatggcgggagggacgcgacgggatctcgctgaaacagaagaaagaccagaagacaaacaagatggatgagtgaaaactcgcgttgagagaatgaatacggccacgatgggagtgggacgaacctgcgagggggtcggttaaacgaccaccttggaggggaaatgagctttccccgggatggttctgtcccccccaccttgcggagccgtttcttcttccgctccccctcgggctgcgacgtcggcgtggccccctccgggcgcctgctgctggcacgcgccgccccgccccctcggggaggagatgggggaggggttccttcctgcttcctcttcccccgggcgtcggcagggcggccgctccccgggcccccgtcgcggggcccagaagcacgaccccctcccggggtagattgttccccctgcggctcccgcccacgccatcgtggcctcgaggagcccgctcctccgacaccccgaccgcctgcatgatggtcaggatggaggcgcggtctggatcgctgcagagggggaggactccttgaggaatgagggatgcctccacggagctgagattcagcacccgttggaccactatcttgaagtcctcaggagcctagtcccatctgaccccctggtgggtcctcatacagtcctcggacccggtgtactcccaggcgccccgggcgcgccgctggagtggcgcgatccggcgacgaagatagtcgccgaacaccatggcccctgtgagcccctgggatcgcaggcccgccaggcggtcgaggacggcgtcgtagccatctcccagatctaccggcgcccgccagttggaggcctgcgctggaggctagctcggaagtcggaggcgcgcttcgtcggcgaggggggtgtagaaccagtcgctcttccagtcatcccacttcttgcggaggacgcagggaatgtagcggttcagcaccggcccccgtggctggaagtagcaaccaccaaccaccgacggcggcgacaccggctgtacggtgaagaaccaccggaacagccgaagggatgggcgcaccccgatgaacatctcgcacaggtgcgcgaagatggccaatgtcattaccgcgttgggggtgaggtgcgccatctggagatcgtaaaactccagaacatccatgaagaaagaagaaaatggcggaaccagccctgccatagcgaaaggaaggaagaagacggaccgccccgggtagcgtggcgccgggcatccctcgcccagcgagactatctcccggccggtggcagattccggcatgaagcggcgcggcagcccggcctgtctctcgctcacgatgcgggaaggcggcagcacgctaccgtcaagcggagcggagccccgtgccatgatgccggaagaagagatgtttgagagcgagcgcgtgtggcgaaggtagggcacaggaaacaaggagttagggcgcaagcggcgaagacaaggggaataatggcgagaggaaggaagcaaatctcttcctcggcgactttatacccttgccaacgctgtgcccggctcctcgtttctcgcgcccactatcttgccccctcgtttctcgcgcccacgcttccactaatcccattcgcccgtttgcggtgcatgaggtggatatgcggccgtggcagtcgagatggaacatctcgtgcgcgcgttaattacgctcgccgaccgaagcgccatcaccatatctccaggaaaaacgaaccggcttgtcccgatttttggaccggccccacctgtcaccaggccttaggaagtggcgtcacgcccgaccgcttccctcgaggagggcgatcgccctggcataacgccgggggctactgtcggtgacatgggaccgggagtatcatgacttagagacttgaggcagacacgatcacccacgtggcctaaccccctcgggggggggggggggtcgggcccgagggtgatacggccgcccttctctttgtctccccgaggggtcggaccgcatccgtctcggccccgagggtcgaggcgccccgaccccttgtgggttttgcgccgcgtatatgtggtaggtgagcatagcggggctcacctaaccacatttattgcggtttggacgagcgcgtcacgccgcatgtaacgcagtgcagcgcgctcgtttatccggtcagtgaccagtcacagaccgatcagatcgtgggttaggtggcgacaggcggtctgacgcacgcctcgccccatcccgtcaggatgagagcctccaatcactcgtccctagccggagccggcgtgttagctcctggagatggcacgttggtcccggtcagatatataccaggcttcatcctaaccattacaagcaagactttgtatgaagaggggcgaacatgcagattgataaactgacgcgtggtggacaagaatgaccgatttgtgaccggtctgacactggtcatgtcgtcagcagacagccatgttcccacgtcgcgcctgcttccgacggaagtggaggtaggtatgggccgtcccatcagaaggtcattcggacggcaaccatacaagtctccgtctgtttatgaaaagataggataagtccccacaaaaaagagagagatggtgcatgtggtatccccttgaggtataaaaggaggaccttgcccacttagaagggggattgatttttcggatccagaaggaccagagagggagagagtaagagctctctggttctccagctcttttgtagcttcttcatacacagatccaccagaacacaggagtagggcattacgcttctcagcggcccgaacctgtatacatcgcccgtgtcttgtgtgtttccattctcgcgaaccttccacacacagactaggagcttagaatctcacccagggcccccggccgaactggcaaaggggggcctgcgcagtctcccggtgaggagccccacgctccgtcaagagtatatgcatcttcacttggagagggtatatatattggtactctcctctagtttattaatggtttgttcttcccaggatctaattcacgggatctccgatcacatagactgggttaccaccatagtataactcacatgggtctcaaacccatctccttcgatgcattgtctatcacatttcgtgatagtcccttcgtgaagggatctgccaggtttctcgctgtttggatgtaatccaacgttataactccggagtttcttaatttcctgacagacttcaatcgtcttttcacatgtctagacgatttcatattatccttagaactattcactttgacaattaccgtttgattgtcacagttcataaggatagccggcaccggtttttcaacaacaggcagatccattaatagatcacgcagccattctgcctcaacagtagcagtatccagtgccgttagctctgcttccatggttgacctcgtcaaaattgtctgtttgcaagacctccatgaaacagcaccaccacccagtgtgaaaacatatccactagtggctttgatctcatccacatcagagatccagttagaatcactataaccctccagtaccgcaggatacccagtatagtgaagccccaattccacagtacctttcagatagcgcattactcgctcaagcgcacgccagtgatcatctcccggattagaggtaaatcggctcaacttgctcacagcaaaggagatatcaggcctagttgcactagccaggtacatcaacgagccaatgatttgggagtattccagttgattcctagcaattctcttgttcttgcgaagcaacaagctaggatcataaggtgttggagaaggcttactatcaatgtagccaaagcgattcaagatcttctccacataatgggactgcaagagtgtaatcccattctcacctctaattagcttaatgtttaagataacatcagctactcccaaatctttcatatcaaaattttgagacaagaatgatttaacctcatttatcacctcaaggtttgtcccaaatatcagtatgtcgtcaacatacaagcacaaaataactccctcacccctaccatggcgatagtacacacatttatctgccttattgactgcaaagcctgcagatgtcaatgttttgtcaaatttctcatgccattgcttaggagcttgtttcagaccatacaaagacttcaacaatttgcacactttgccttcttgaccttcaactacaaacccatcaggttgatccatatagatctcctcatccagctctccattaagaaaagctgtcttaacgtccatttgatgaacgagaagaccatgtgaggctgctagggaaagtagcacacgaattgtggtcaatctagcaacaggtgagtaagtgtcaaagaaatcttcgccttctttctgagtatagcccttagcaacaagccgagccttgtacttttcaatagtaccgtcaggcctaagcttcttcttgaacacccacttgcaccccacaggtttacacccatagggtcactctgtcacctcccaagtcccgttagcgataatggaatccatttcactacggacagcttccttccagtagtctgcatcaggagatgcatatgcttctgaaattgacttaggagtgtcatccacgaggtacacagtgaaatcatcaccaaaagacttagccgtcctttgtctcttactccttcgaggagcttcactgacatcctcctcagagacaagttcatgtgtatgttcagtttgttctggtggtgtgattgaactgggaattatttcagagggttggttcgaaccactatgtgtatccttcattggaaaaaagctctcaaagaaggtagcatcacgagactccataattgtaccaacatgcatgtccggtacctcggatttaactattaaaaatctataggcaatgctatgatgagcatatcccagaaaaacacagtccacagtcttaggtccaagtttgcgcttcttcgttattggtacattgactttcgccaagcacccccatgtgcgcaaataagaaagtgatggttttctaccaatccatatctcatatggtgttttgtccttatttctgttaggaactctgtttaacacatgatttgaggtcaacaatgcctccccccaccatgccttaggcagtcccgcggtgtccaacatggcattcaccaagtcagtcagtgtgcggttcttcctttcagcaatcccattagactcgggagaatagggaggcgtcctctcatgtatgatgccatgttcctcacagaataagtcaaacttgttcgagaaaaactctccacacgatcagacctaagcctttttatctttctgtcaagttgattttcaacttctgccttataaattttaaaatagtctagagcctcgtctttcgttttcaacaagtacacatagcaaaatctagtagcatcatcaatcaatgtcatgaaatatcgttttccacccttcgtcaacaccccattcatttcacaaagatctgaatgtaggagttctagtggtgccaagtttctctcctcggcagccttgtgaggcttgcgaggttgcttcgattgcacacaactatggcacttagaacctttgacaatggaaaacttaggaattaaacacatgctggaaagccgagacatcaagccaaaattaatatgacataaacgtgaatgccaaacattagcctcatcatccacactgccacaaatatggtttacagatttattgcagaaatcagaaagggaaaagcggaacatgcctccgcactcataacctttaccaataaaatatccatgtttagacacgactactttattagactcaaaaaccatcttaaattcgtctctagtcagacgggagccactaacaagattcctgtcgatagaagggacatgctgcacgttcttcagctgcacgatctttcccgaagtaaacttcagatctaccgtgccaacaccatgaacagaagcatgtgacccattccccattaggacggtggaaccccgtgcgacctgataagaagaaaacaatgagatgtcagcacaaacatgtacattggccccagtatcaacccaccaattagtagattgattaactgaaaaaatagtaggtaaattaccatacccgcttccatctccagtgttgccaatggtcacattagcagacttagaagtctgccctgcaggtgccttcatccccttgcgctgtggacacttcctagccagatgaccaacttggccacacacaaagcaagtcctctcatcctgattaggattgttgttgttcttcttctgcttcttgaagttggtggtctgctaagctttgtatttccccttgctcttgttctgggccttgtgcacaacattggcgctggactgcccaccatcgcccttagacgcggcatctttttcccgagctttctcctcaacatcaagagacgcaatcaacccctcaacggagtattcctgtctcttgtgtttgagtgcagtaccgaaactcctccaagatggaggtagttttgcaataatgcacccggccacaaatttgtcgggtaagacacacttaaggagttcgagttccttagccatggtttgtatctcatgagcctgttcgactacagaacggttgtcagccattttgtagtcatgaaactgctccatgatatacagatcattgctagcatcagtagcaccaaatttagtattcagtgcatcccacaactccttagcgtcggtcatatgcatatacacctcgaccagacgatcgccaagaacgctaagaatgcatcccacaaagagagtagtggcttcctcgaattgcttctgctgttcagcagtaagaactccttcaggtttgccagtactcacccagaagcatttcatagctgtcagccacagagtgaccctgatctgccatctcttaaaatgcacaccggtgaatttatccggcctcagtgcatcggcaaaaccagccatagtaaaatcacagtgcctataataaggtttttggattgttgagattatgggcatataatgatttaatttattccataaataaatcatgacattacagatgaaaactagcatgaacgcatcattagatctacacatgtaaactacgcagaataacatgaacagatcaaatatgcgcaacatattgaacacgtaccgaggtgacgaaaagaccggctgcttggtcgaaacttttcgcaggtgtctacgaaggcacgaaacacgcgagcgaagaggaaggtgagccgtcgcgaacgaacagggagcagtcgcgcgaagcgcttcccaaaaaccttattgccgccttctcccggtgcaggacgtcaaaggcagaggttccggagacctgctctcccgatcgctggtgcacgccggcgagcgggatggagtagtctacgagcgacagcgcagtacagagtaggaggcaaaccctagattgattttgcgtatatactgcgtgaagacggcgggtcggtttatatagagaagggtcgcttgatcagggcgctcgcacgatctctactgcgcgtaaccgaaccggataagtcgcgcataacttatccggactccacgccgtttgcacgcaccagatttttcggaacacatctgcgcaagggtgaggagccaatttttcggaccattcgacgcgtacgtcgtgcacgcgcgccgcctgccctgccaggcgaggcgagcgagcgcacgcgtgtgtttcccctcttctctccaccacacatgcttcaagcgactaggagggcatcatcccttttaaggaggtccccctctcctagaataagcaaggtggtactaaactccacatgcatgccatcccatgaggtgggcttttgtgattttccaaagaattaatcttcgagtgggctaaggcccattcattaattccaacacgtatggtgtgcgtgcgtatcttggctggctaagcttacacgtactagaccgggttaggagccgtgttgctggagaagtgcccaatcgttgagcggcatcaccatcggtagcggcaggacaggacgaacgattcaagcggtggttccggctgctcttcactggttggcagctgttatcttttgggttcttctgtttcaggggcgaaggcgacacattcgtaaactgatctcaacgtacgtttcatgggtttggtacttttgattatcttctcttccgaggctcccccgagcatgcatgggacctaatgtctccctgtacctgagctgctctgtttttccccgaaaggaacggggccgaggaacctgtctctagcagcgtaaacacatgacgaagaaaaaaaaggcgaaactatgaccagtactaatctaaaataaggatagtagggccagtacgaaccgtatgttaattgttggccgaatacaaaaggaaggtgattttccaggcccggaacaaacttgtctcgctccaaacgaataagttcattgggggtccctcatcttaacgtcgcgttcaaatttcgtcctccaaccacaatactagatataacacgtccctcaacttgcaaaactagtgtactatccggttttggctgacattacgagtgaaccccatatgtcatgtctagttcttcttcctccaaccttccctcgtccatctcctattccacgtgaggttcttcttcgtcatgccattcagggaggtcaccatgatggcgttgatgctcaacatccgcggtatcatggaggtggctgccatcaacaacttgggggatacgatgaaggcgacgacggagcactactcttggagggggcacggcacgaacgaccataaggcgttggcgtacataacttggatggtatagtgtggtagtgtgatggtgacggcggttcgactgaagctgcggaattgggtgaattgggtgggaacgagagaggagaggggagatggtaatatgcgctgtttgagatattgggtacaccggttttgcaagttgagagactcgttatatccagtattacgatttcaaggacgacatttcaaactcggagacaagataagggatttaaaatgaacttattccagctccaaatgtacagagcggccgggcgttagcccagatcaccacgagtccagcagtccaaatgacattggtactagttcgctaccagcaccgcttgcacagttggacaccggcatcacaagcctaaaaaaatactccagatacaggtaatagtcaagcatcacaaaattccaatttctaagtagtgctttgctgcccacttgagtcttgaccgacctacatagatgacaaaatttccggaaaaaagatacacacgacgataatagataagaaaaacatattctgtggcaagcaaccaaagagcttactaacatacaatcagagaccgtaaatgtttataactttactcactgaagatttaaaagacgacgcaggttgcacagggatcatcgaaataaaatggcgagtcactactcactaatgacttgtagccaggtgattctgccaaagcaaccagttccaaccattcaaaagtgcacacagaattttcaccgatttttttaattctgagcaaaataagaaatatatttttttatgtaagcaccacagccatctaattctattaataagcaggacgttctgattcaagaagcgtccatctgtttgatagggacgctgtcatttggcagcgactaatttggacgcaaggtttttactgcgttcctggacagaacttggacgccaaaacttaacagcggcctccgccgagcaactgcacgcccgcaacatagaaaagaaatacagatctacgcattggttagtgtctttctttctatccctaaccttcccttactgcagaagtcatgccctagtcttatatcagatgagattagagtttaagcagagatcacgagtaagattatttgcaaggtatgtttacttttcgttgtttggaattgattagacattagtactagtcaagtagcatatctctccgagttctggccagatggttcttgtaatctcatctcacattttgtgaatgaggctgtagctgagtaatatatcagttttttccccgtaaaaaaaactagcagatctgttgtatcattttattcttctatcatggaaaggttgcggcactgctaatcgaaagtatgagtaaattactgcatgaaatgattatatcatcattagctatgtgctccacgttagtagtgctctgtgccatgtatatactaaatattctgatcatgaataaatcgaatatggaaattgatatatatttttcttttctttattactattaggtcatcagaccatgataattgttcttgtatacactggaggtgaaattgtatatggagcgactggtgcagagtatagcattccacccaagattacttttcctgcttccgaagctacaactttcgaagatgtaaagaatgagatttatggagggctaaaatattctgaaactgaatattcacttgttatacaaggccgatatgatgtaggagcaccaagtccacattttttccagttgatcccattatataagaccagatcatggcaaatgatttttgacatgacattagcactaaacagttggcgtatggtggaattatatgttgagttcactccaacaaatagtggattcagccaaaaccacattgttagtgaaataataagagaaaacctagaaccaactatggctacagttgctgagaatattgtgtcagcatcacatcagtcgcctaagcatggtatatctcctaaaattcatgatgtgagtaattctgcaccaattgtgggcttgtcttctgataatatcataaatgaagcgcaagaaaattctcaagatgatggctatgtggacgaagagacagaacgtgagggtgatatgattgaggaagatgagagcgatggcgaagccgaagaggatgtgaatgataacacctatggtcagcctgtggtcaaattgatcaaatcgttgccactcgtgggcaggtctgacaagcaccctgtaagtgccttccatgatatatctgtgctacagaatacaacggccgatgagagattctttggttcgaggaaacattttaacagtccattagctaaaggccgaacttttgattccaaggagcatttgcagtttgctattaatgaatttcacattagtaccaatcaagaagtaaaggttaccacaagtaacaagtcaagactaagtatgaagtgcatagacaatacttgcttgtggaagctatatgggaaaccaacaaaaattggttcaagttggaagatacaaacttgcccctatcctcacacatgtcgagctcccgctgatcgacttgatcgtgcacaattgacatctgcagttattgcagatgttatacgtgatgacttaaaagagaacttggagttgagcataatgaacatacggcaattagttcggcaacggtataaaaatgtaaagccacactacaacaagttatggcgtggccgggagttagcaattgctcaactttttggaagttgggaaggatcatatgcattgctcactccattattggaggctattaaagcaactaatcctggaacaagatatcaaattttgtcacaaccgatgactcgtgaagggcatcgagcattcaagtgcgtggcttgggcttttggaccttgtattgaagcagtaccttatcttcgacctgtcattaatatagatgcttcttttttgtctggaaggtaccgaggtaggttgttgatagcatgtggatatgatgctgaaaacaaattattacctcttgcatttgcaatagtggagaaggaagacagtgacaattggggatggttcatgagatggttgcggaaagaggttattggttttggtaaatttgtgtgtgttatttctgatcgccacaaagctatcaaatgggtgttcaagcagccacatattggatggaatgaaagtgctggtgagtgtgtgcatcgattttgttcacaacatattgctgagaatctttacaagcaatgtaaagatgatgatgtggtaaaaacttttaattgggttgtcaagaagaagaaaccacgtagattcaatgaaggtatggaagctatttcaaaaacttgtccagatgcaattgcttatcttggtaaggtgggaaaatatcggcaagaagataagaatgagccggaaaaatctaaaaaggttttccagtgcatggatggtggacatcgatgggggataatgacaagtaatggctccgagtctctaaataatgtgttcaagtactcaaggagattaccagtcatggcaatagtggaggaaacatttaacaagtgcttagaatggtttattgatagaagaagatcttctcttgatcttgcaaactcagggaaaatgtggtctcgacgggttgagaagttattagtgaaacgaggggccaaggccggatccatgcatgttatatcatatggtgatgaaagaggagaatatgaggtgaaggttgaccgtgaacgagttgcattgcatcaaggagatcgtgttgtgtatgttcgaagggatttcaagtataagctagttatgcgcaacaatgctattccgacatgtgagtgccaaaagcccaaccttactagtattccttgtgctcatgtgcttgctgtttgaaaagatagaaaccttaatgagaatcagtttatccatccttactactcttctacaacactcgcaaacacttgggctggtcagtttcacccatatggaaatcaatcggagtggccaacttataatggtccaattattgagcctgatgctaggttgatacagttgggtcgacgaagacataaccgaattccaatgtatatggatgaaatgcaaggtcgacgcttaggacatcaagcacgtcgttcaacccaagataaaaatcaagccggtctgtcataatttaattattgtatgatatatctatgcttcctactaatatagaattaacactgcaggtgtgccatctcaccaacatcaagggtgatacaatccataggatggactccgctgcatcgccctagaaatttatctagcaaatctacttctagcttatattataaaatttggatttagttttctgtgagtaaggacttcattctcatgtaacaagcttgatatttttaaagttccctattgacaattagttgttatttttgtatcttgacaaggacaacactgcttgtcttatttcgctcaatgtgatttgaatggaaatggcaggaggttttttttttttgatacgttgaacaggaaatacaagatacaggttaaaccatatgtatgtaaaaaaatagattctaatttatagaacttacagataaacaaagaaaatcacaagctttgataaaccaaataataacattgtctaacagcaggagtaacaaaaagctctttgccctgatctatgctcaatgtttatcctgagattccagcacatcagaatctgtacctaaactaaggtatcttgtaaatcccctgtttgagtacaaccagtcatccatcacatccatgtttatctcctcaggtttaattggtttaggggtagaaaatggtgatgcactatcatcagatcgaatgtcatctacacataaaggtagacctgactcgcttagcatgctgcttaacttagcctccatattgatatcctggacgttattgtaacatgtacagataagaatcttgcccatctttctccatcctctactcatagcacatttaattctccacgcaacttgtttgatagaacgtagagcctaaattagcattttaagaaaaaagaagtgttattaagtgaattattgcaagtaaaaaagaacaagtaaagaaatgttagtataccaatcgggagagaggtggaccactgggcatgtaaccggtccaatcgaagttatccagtggataagggatgggatcccacaaaccttgagcggaccgagcatccaaaaaaacagtgtacatcccatactgttgaaaccaatgacgatattgtggcaaacttgcctggtcaaaatgttgctcctcatcaaccatgctttgccaaattctattgtattggttaacatattctgcgtggagcttcctccaatcacgtggtttccctgtatgatttattttatggagttgacgaagcttgctctcatcatgtgggggaggaggtggaatggtttgctttctccctagttgtctcatcactctatctggataatgaaattcaatgatccaaaaatggatgagaggtactcgactataccagaaagcacgttcagctctaactcttcttggcatggacatcaatagtccattatatggttcccaagagacctcattgtcttgaacttgatccagcaagttctgataaaacgcaacacccgagttatgtggcagaggataaagttcctggccacaccattttgctccaaatgtaggacaactctcagggtctggctctccccaactaatagggttcctatcttgatccactggtcgtcctggtctcaaccgcgaccaacaccaatgctgcagaagcactaatggaccagccatctccaatctctctcgttctgcaccgaagcttaattgtctatatagcacggcaagagttgttgccccccagttgtactcctttggtttatcaagatcctgaaggaattgcaggtacattgcaggcactccatctcctgatgtatccgggaaaatcattgacccaagaatatccaaaatgaatgccctagtgtaatgttcaatttgttcttttgttgcattttctggcatctccttgaactgatctcgtaatttctttaagctgatggagtagttagaagatgtcatatttcccccgctttccaagtcaccgtccgcctttcgctttttttgcttcatcacttgttttcctggagtaactcctagtaatgtctcaatttcatcaacccatggcccctctaacttgcctataataggctcaccttgaattggtaagccccatagacaactcacatcttgtaggctaactgtcatctcttcaactggtaagtgaaatgtgttagtctcaggccgccatctctctactaatgctccaattagaaatctatcaacactcatcccaaccatctgggaaacttgatagaatccaagtctcttcagtagtggttcacataaataatggtatagaatgcccacgtggtgatacctgacactaacaccatcattagcctgcatacgtaggatacaaattagtccaatcattttttttggaaaggtatatgacagaagctagcaatagcttacattttcccaaacttttgagattttgtgctggcaatgaggcatccatagtaaggcactgatacgttctgaaacatttagttcagtttgctgaactaaagtttgatctccatccagtaagcctatctcctcatcacttattgtaactaaccgacctaacccatcttgattagtcctcatcttactagtttgtagcatacaaaaaattaaggaagcatgtcaaacaacgtacaactgatttctttttcaggaacttataaacaagcatcgtaagatgattgatcaaaagtaaaactaatttctagattatttgcacacttttgtttccttatagtcgcattgttatgttgacagaactgggataagcagataaactagcttacaaagcttgttaggaagctaggatgcatgttgctatttgctaataactaatctgtcattgtcttataaagataagcacaaaaattaacaactaatgcttaatgcagcagcactataatgtatcactaaagaaagagaatgccgcacaacgatttagtctccaacgaaaaaaccaaaagagctcatcatgtgtaagacgactaacctgatggctgagagctagtcgcgtgggtgcgtacttagaactgacgacgacggcaagcttgataccttaaggctcgatcaagagaaataacgggatgggtaccgccgtcgccacgccgttaaggtttgtggccgctggtttactcgtgggttttcagattggggattttacggtgataggatgcagaagaacagggatactgttttcagagccctttggcccgtgggctatggacgcaatgagaacatcgcgtccgtgagaaggccggacgctctagatcggtggcgtccaattgttttaatgggacgctgcggaattacgttgtcctgcttacgaataaaaatccaatacctcagtgtttacataaaaaaatatattttttgttttgctcagattaccaaaaattgggaattttcacatcagtatccatctgttgtgatgtagtacgtagaagaaaaacagcatgttgtgattattccgagcatattgcaagcatgaaaccaactttttagtacctgaaataggtaaatgtacaaaacaaaaaccaagttgaaagcaatgcttgctctagcgtaaaactctgatgctactgcaatgcagggcacaaaacctgagctgctaggtcaccatatcatgaaatagcatcgaatcctgaaattctcgagggacctactgagtcgacaaacccacggactgaaagttcaggaacagaaacatttttctcctgaagtaactcatggtcgatgtaaacaacgacgactgtaatgtcgtcatggaagaagcgccgcacccctttttcgactttcttaagatcaacaaacctcatttctcgcttccgtgcagcttctttcaaagctgtgtttactagcctctttgcaattccctaccaaaattatggaaattagatttagcacctttccaagtaatcagcctaggcattgcgggatagtcccacaaacaaagaaaaacaagcaacgacacatgtaagtaaaggtctgaagacatactgctcgtggatttttgtagacgatgtcaacagcttgttggtttgttaagtgctcccaaagaccatcggatgcaaaaataacaaattgatcttgcagagaaagaactcttgtgcagatagatggctctgctgttagaacaggtcggcgaagaggctcagaaaggcggaagcgagttatggatggatcaagagcaaattcacgcctctttaaatatgcatcacctatagtccttgaaacctggtaagtaatcacaaaatgtgacaatagttttacatcaagtacctagtttgcatatgcggaaaatcttgataatgtactgctcaacatgtttgggccatcattggggaatctaaatgacacggcagtatttcttgttctcttactaccaaaataaataacatgatcaccttcataatctcttgtaaactacaagaaacacaaaatccttctaaagcacaaactttaatttctatgatttgttgccctctacccctttacttggctcctctaatgggttgttgtgtaacaagtgaatatggtccaatcattaccaaattaatatacaatcacaaccatccttgaaaccatattatagttgtaatagttactcaataactgttgcttaccaacctggattatgccttttatgcgccaaacgccatgcttcagaacaacaatttgtgaatcatcgggatgacgagaaataagttcctgcctcacttcctccttacaagcattatgatcccttgtaatttgctcagcagtaatcttgtttgttctacccaaatagccaacaactgccctagaatcacctaaattagccacatatagtacccctctccatatgataccaacaagacaacaagatccaactgcagctatcataggctttaaaaactgcgttctccgaacaagtgtcaagaaaccttcttcggtagcagaaaatgcccctcgaacaacttcctccgatactgtttcactttctcgggcaagtcctagaaagataggaaaggttgagcagtcattttggtgcactgaacaatttcggttgagatatgcttgccatttattaacgacaaggataaggtcacatcatgcagtcagtggatacacttactcagtagcatctcacgtaaatcaagtcagtctgtaagtaaaagacaacattaagatgttgaacacgacaagaaactacagtacctactagtaatctgttattgcaaaggaccaagaatattgatagcttgtccaatgatcagattccactcagtcactggtaagagcattgcgttgtccattgcactgctcatgaaacaacagcatactcgatgagtggaatgtataccaacaagaattgcatccagcaaagagcaatcaacaaaggtaactccaatgattcagaataattacagaaccaaaaaactaataaaggaaatgctactgctcagtgcatagccaacaggtgcatcatgaagcaactaaagagtaaaaccacacaaaattcattcatcaccacctacaagttgaaactaaactaagccatgaagagttgcgattaatgaactggagtggattctattgcaagaagaacagtataaggaagcgactacttacgtatcaggtgtgcgaagaggtgatcagatatgaagcgagcagcatcggcaccgccgtggccgtcgtagacgccgacgaaggtggcggcggagcccgtctcgacctggctatggtcttccaacgcctcgttggcctgcacgacggcaaaggagaactcacccgccgcgtgacgccccaggtcccgcgaccacagcaggccgtcggcgacgccgccgccattatcgccgccatcttcatccttcctcgtacgcgcgtacctccgggccgggcccaagcacgcggacgcaatcctcaacaaccacgagaacatccctcatttcccttctttccctcctctcgaaagaagtcgcctttggaaccccaaaggaccaagaacgcccaagaacaaacttgaacaccctaagtgacaaaaaggattaggtttctggaggactatcccaaatttaatttctagaaatcgaaaaatagaacgatttgtagttcaattatacctgtcgttgcacttgcacctcaccagaagaatcacagattgcaagtgaaattaaatctgggaattgggggggggttccggggttaatcaccaccacacatcccccgagaccagccgaaaacaaagagcagattgccccaatttagtgcaagaattgggcttattatggaatgactagccgaattatcggctaaattggtttttgacttttagatcgcgaagctcggtcagcgcggggaagacgaagagaaagcgggggacccgtactatagttttgagtgatacccctgtcgttgaggttatttacgaagatggcaaccgaagaaaagtgcaaaaaaggtcccaggaaaaggtccgtgagaccgtgaccacgaccgggatgtgttcttgcaaaagggttgggaaggaaccggaacaagcagcacaggattgttgcgttgcgcgtcggccaaacgctcgccgcgacaagctacacgtatacgccgcgacgcgatggcataataaacctcatccgtccacggccacgcgcgaccaaaaaagcgcggccgctgatgtccaccgaccaccgctcgcttcagcggcagcctctcgctgattacttcgcgttcgcgtgatacggaacggtgggtggtggagctagtggtgtgtcgggaggcggatgggatccgcgagccgagtcagatcgcactatcgcgcgacagcaagttcaataatacagccgactactaacttcaattcatctatagccaatctaatagcttattcatacaatagttatatactacactattaatatctggtcccacctgtcatatacacactgcgtcttagagtccgtgctacagctggctacaaatctgtagcccgctactcttctctctccttatttatctttttaaaatatgtttgtagctagcttatagcctgctattatacctgctcttaatctgaagcttatctgcaacggtgattactgtgagcttttagctcgtgcgagtcgtggaaaccacgggtgaacagtcacaggtcgatttccgagatcacttcgcactgtgctaggcgattggagtactcctttctgtgaacgtcgactcgacctcctctttgtgggacatggtttttgagtacttatctacgtttaccgcacgattgtgtttgaattaggaattaatccttctcgtgaacagacgaagtcgcgctaggactcatcgcatgatcacgtggttgcgcttcaagccaatgaatgtaggtttgctagtaaaatggattagggtcaactaagctctcacagtttgggtgagagcttatcagcttaagatgggcaatcatgccgtatgggccatagcgcgaggcccagggagaacatgagcagattgtgccctatgaacccttttcttgccttgcaacggggagaggggatcctttggaataagttcatctaaggtgccttaactttgataacgaatccgattttcgtccttcaaccgcaaaaccagatacaaggggtccctcaactatcaaaaccggtgcaaattaggtccttcagcggtttcgatggtggttttggctgatgtggcgtctacgtggctaattttgacttggtcttgatctgacgtggcgcttacgtggcaattcaattcggaaaataataaccccgtgggatccatatttcagtttcacacacaataataataataataatggtgggacccacatgggccccagatgtcagtctaactcatcccctcctcttctgcttcatctctctccttctcccctctcttcatctctctcttgcgctgggtcattctgattctcctcttcctcatcttctctgtcttcatctctctcccctctcctctctctcttctcttcggttgacaggcggcggggagagggcggtggccggcggggagaaggggcgcgacgcggcggctggcgggagggaaactagcggggagaagggaaccagcccggcggcgccgccgcggccgtggctgcggacgacgtcgacgtcgacctcagcatcctcggcggcgggatgaacgtgtctcgccgaccggccgacacacgcgcgcatcctcggaggcggccgtccgcgcgggtgggtgagggggccacctcgccggcgggagaggggagaggcgaccagccgcgaagacgaccccagcgacgattacgaccgtgcagcgcgcggcggaggccgatcccgcgagcaggaagctcttcatccacggcctcggctggggcgccagagccgatgacctccgctccgcgttctcccgcttcgacttctttctcttccgctcctctcttccgtcggctcgcgctcggcaaatcccgcgtgtcgtcctcctcctcctcctcctccttagtccaaccctcgtcgtccaatctccggctcttctcctaacgacgtcgcggtggaggagggcacggtgctgtgcattccaccgaggatgctgcacggcgcgtccatggagttgcttagtttgcgttctgtttggtcttaattttgtttatgtgcctaatcatacaaaggtagaagcaatagcaactagtactagctgactggagtatattttgcttcgtcatcatcatttgcttgtggtacgacgggattgatgaatgaatgaatgatcattgttttgggcaagaaaacaccgttccggccggactgacgaggaacccatcgatccgctcgccgcggcccatggaaacccaacaggagatggcggcgttaccttcggccgccagcagctaacaacggtgggtaatgctcgagcacattgacgaactcgaggtcgacgatgaggactccaactacaactcctgctccgccgctgccgacgacaccgccaataccgtgagtctatgacgacctttttcacctccgacggccacgtcatcagcgtatacttccgcctcaaagcgccgcccggcgcgtcacgcctatgccccggcgcgctgctccctcctctcccgccggtgggaaggagctaggcgagctccctggcctaccggcgagcgcgcacaagagagagatggccggcggccactcttctccatttccgccgccgtcgtcgtcgccggccgcaagagagagatgaagagaggggagaaggagagagaggaagcagaagaggagggggtgagttagactgacatggcgggcccgcgttggtcccactattattgctattttttttgtgaaactgacatgtgggtcctatggggtttattattttctcagatcgaattgccacgtaagcgccacatcagtgccacgtcagattgagaccaagtcaaaattagccacgtaggccaaaaccaccatcgaaaccgccagggacctaatctgcaccggttttaatagttgagggacccgttgtatctggttttgcagttgaaggccgaaaatcgaattcgttgacaagttaagggaccttagatgaacttattccagatcctttcaaccggatgattcggtcctcatcacatgatttcgcgcacgaatagtcccgatttgcttttgtagtcgtaatgattgtgaatcagacgatatggcaccaatcctacccaaacgcattttcttcttcttttcattcatctcatccgattagatctcatccgattagagaaagtttaataatataggaccctaccagctccaaaatttaaaccatcatctaccgtcaatctaataactcactcatataatagttagctgtagaaatatattgtatcattaatgctccacccatctctctcaaatagtttattagagctcgtgctgtaactgactacaaatctgtagccggtttttttacaaatctgtaaccggtttttttatctctcttctcttgtctatcttccacacaagtacaaatttgataaggcagcttgtgtagccctcttttatccgactcagagcaggtacaatagcaagctattagccagctgtaaacatattttaatgagataaaggatgagagagaagagcagcgggctacaaatatgtagccagctgcagcacggactctaagacgtaatgtgtgtatgacaggtgggaccgagtattaatagtatagtaagcaactattgtatgaattaactattaaattggctagagatgaattggagctagtagtgggctatactattaaacttgctctcaactctacccgtgcagtcatctgcactccgctttgcgggtaggcacggctatctagctgtaacctgccgagaccttcgaacgattggttacagaaaagagaccgccttgggggaagggaagcatcaagcgtttctactgcaacttggggtgccaccacccacacgaacgcccctgatcccccgccgccgcacgttgcccgcggaccattcggtggtccctttctctccccttgcacgaacccgtcttgttctcaccgacgacgcgctggcatgtattttcaacgtcttcttctgtcgtgactcgtcagtgtaccagcttccatagacccttatctgatagagtacgtacgtacagtattcaggatgtgaatgttaatgtatgcaatgcacgcaggcagcaaaatactggagaactgtactactactaataaaactatcaagcattaaccaaacgaataatgaaggaaggaaaaggcaggatccgaagaatcagcaggaccatcccggttgctatagccagtgtgggggcagtggcagtggcaggagtaaatctatcggagtcctgccttcccagcaggagcagcagagtcgcggcgccagagcgacgctggctgcagcctgcatgtatgtcccgcgacggcagcagcggccttcccctcgctttccgcaaacgtggacgcgaacccgtcgtgaagcctcctcctcctcatccaatccacctcccccctctctttcccaatccccactgctgcttccgtccgcttccgattccaagtttccaactccctccattgctcgcctcgccgcgccgcgcgctacctaaaccccgcggcgaggctttagggtagatgcgagaggaggccgcgtggacggcggcgcgcatcatcagcgcgtgatggggaacacgtgcggcgtcacgcttagatccaagtacttcgccagcttccgcggcgcgtcgcagcggcatgatgaggcggggtacgcgcccgtcgccaccagcgccgccgccgccgccgccgccgatgagccggccgggaagaaggccccgcgcggttctgcggcggcggcggacgcgccgcacgccgcgtccatgaagcgcggggcgcccgcgcccgcggagctgacggccaacgtgctcgggcacccgaccccgagcctgagcgagcactacgcgctcgggcgcaagctcgggcaggggcagttcggcaccacctacctctgcaccgacctcgccaccggggtggactacgcctgcaagtccatagccaagcggaagctcatcaccaaggaggacgtcgaggacgtccgccgcgagatccagatcatgcaccacctcgcgggccaccggaacgtcgtcgccatcaagggcgcctacgaggacccgcagtacgttcacattgtgatggagctctgcgccgggggcgagctgttcgaccgcatcatcgagcgcgggcaattcagcgagcgcaaagcggccgagctcacgcgaatcatcgttggtgtcatcgaggcgtgccactcgctcggggttatccatagggatctcaagcccgagaacttcttgctggcgaataaagacgacgatttgtcgctcaaggccatcgatttcggcttgtctgtgttcttcaagcctggtgagtcacccctgctgttagaaactcaattatttatttctgtgactgttgcgcttgctccatcactttctgagcaatcgttgatggtaatagtccaatagatggaatggtttggttggtggaattaatgatacatagttgctttagctcatctgactagagaatgtatggaaattaagatttgagaatagagaataggaatatagtttagtcgtttaaaatcatttcattcattcattgggactcaacatatactgatccaatctgataattagatgttaacatttacgcatcagatggtgaaggctgctcttggtctggggttctctcttttttgggtacaattgttgttcgtaaatgagattgctagcaaaatatgggtttttgcattcatttaaaaagtttatgaatactaaagaaaaatagttaaacttacagtttttcaaaaaagataaattaattatgggacaaatatgtgaagatcgatttctgaattgtttcctgctgctggtggatgaataataaaaagaaaagaagaagaaattgattgtttggtgctttgctgtacagactacagcaataggaacaatcaaaatcgaacctgtctttgtacacttatttgaatctaaatatatgttattcaccgatatactgatttgaccacttctaaaagggctaaaactaactgtttcattgcaactaatagaagctactttacatatagctaaaagtaccatctatcgcgaaatccacttcctatgaatctctcttctataaatctatttaccatttatgtgcatcttatgcagcatttactgtattaatttttcagtgtaattagttatcttataaagaaattccgtttgttgtttactattcttaggtcaagtttttactgatgttgttggaagcccatactacgtggccccagaagtgttgcgtaaatgctacggaccagaagctgatgtttggacagctggtgtgattctttacatactattaagtggtgtaccgccattttgggcaggtatatatttactcctttattatcataaattgacttggaaattcaaaccttgtgttttcactcgtctaagctgacctgtactatatttaatgcagagacgcagcaagggatatttgatgcagtgttaaaaggtgtaattgattttgattccgatccctggcctgtgatttctgatagtgcaaaggatcttataagaagaatgttgaatcctcgccccaaggagcgcctaacagctcatgaagttttatgttagttattttcaccattactctagttcttttcttcaataactcagtatgttttggtgtgtgtattgttctgaaatgtgccctctatggtgcaaatatttagttttgtaacagtatatggtaactacttatgcacagctgttggacaaagatgttaaagaattattttcatacctgaccaggtcatccgtggatttgtgaccatggagtcgctcctgatcgacctcttgatcctgctgtactttctcgcattaagcagttttcagcaatgaataagttaaagaagatggctttgcgagtgagtacattcttttccttttggcaattctaaagttactgtggtagctatcatagtacttcacctttcacaagcaatttgaagtcatcctccattgttgtttgctggctagagtgtccgttaccttgtcttgttccttttgattgttttttttttcagaattgcttcctgtctttattatctgaattttcttttgtgggctagtttttatactctattacatgaccagtacttatgggggcacatttgctaagttttatgctgactgacggtttgtcctgccaggtaattgctgaaagcctttcagaggaggagattgcaggattgaaggaaatgttcaaggcaatggacacagataatagtggtgcaattacatatgatgaactcaaagaaggcatgagaaaatatggctcaacactaaaggatactgagattcgtgatcttatggaggcggtaagttggtgaaatctattaaaattaacatttatgattgctagcttaaggatccttcctgcatgtttttagatattttatgatccagattgcttctttctgaacagaaagagcactgaaagtctgccacctggttccttgcactgttgcacatgtacacaaaagccaagttttatgatcagtgacccatgctttttcttcattgaattaaaacatcattgattgcagaaactgaatgccatggatgtgtctccttagtgtctagtatatggtttgcatcttaggcagaactgttgtctgtgtgaccgtgtgagtgaaattagacaaactatctctattaaactaatctactgtatttcaccgattatttgaagttgagtcatatttttgtcttctctgattgccatgtgatttcatttccaaaccacaagaaaacatttttttttaggctttcttcagctagaacttattttcaatttttgtgaatactcaaaaggtttacatatctgtactgtgcattaagaagaagtaaacaaggtttacaaagaaagctttcactcaactaactaggggcgaacaaaaacaggacaaacacagaaaggttatttttatttcagtgagcatatgcttatgtggcagtaaatgcttataacttcatctcggttttttatttttgtgtgcccctgttgttttaatttacagtctcccttatgtaacgggtgtatgttttatggtgtagagtttattattccttggaaaactgaactgtgggcttacatatttatttttgtttgaataactttaggcggatgtggacaacagtggaaccattgattatatagaattcattgctgctactctgcatctcaataaactagagcgagaggaacatctagtggcagccttttcttatttcgacaaagatggcagtggttatattacggtggatgagcttcagcaagcttgcaaagagcataacatgccagatgcttttctcgatgacgtcattaaagaagctgatcaggataatgtaagcatgttgccccattagtttgttatagctaacacatgcaggaaggatatacaaatatttattaatgagtaaagtgcacgggcggtccttaaacttgcaggggtgtgtcatctaggtccctaaactctcaaaatacatacaagtccaagaacttgtcatagtgtgtcatttaggtcccaaatcgccctagcccctataggatcttacgtggcactgatgtggcatgccacacggacaagacgtggcatcattttgactaacaaatgaaacccatttatctttttcttcttttcttatcttttcctcctcttttttttctttcttctcctttttttttcttttcccgagtagaagaaaggaaaaaaaagaagaatgagaagaaaacgaagaaaaaagaagggagaaagaagaaaaggacatatcacgtccatatggcatgccatatcagcgtcacataggattctataggggctatgtcgatttgggacctaaatgatacactttgacaagttctgggacctagatgtgcattttgagagtttggggacctagatgacacaaccttacaagtttaaggaccgcctatgcactttactctttattaataatctgtttaaggaactttaaaagatttcacttgtcaaagcttgtcatggaacaaaactgcattagtactgtttcacaaaaaaaaaacaatttaaccatacataaaaacaaaagcagcactaaatctaagaaaaattaacgagatatagccatacctcacatatcaactgaatattacaaccaattgacctcttccacaacattaaagttggggtagatagtggaaatatagaaaatacatatggtcttgattttcctaacagattggatatatgtggtgaaatggaggtagtaataatttcatgggaatcactagggatatatctgcaggacatgacatgtcaggttatgctttcctagtgatatactgtggtgtacgaaacttgaacattcattttgtagaacatgtgaattgctgaacccattgctgtttgtgttgtttcttcaatacatatcgtccaaatgttcgtggttgaatgtctattgatatggtttactagttactgcgcttagaagaaaatatcttttatgtagcagtgatctaattgcacttatttcactccttttcatcaggatggtcgcattgactacggggaattcgttgccatgatgacaaagggcaatatgggtgttgggaggagaacaatgagaaacagcttgaatataagcatgagatgagacgcacctggtgcactatgaagtctgaacgtccacagtgcagctttgaaacttcttcaatctccatgctctatacggacactgcctgcaatttttgtacgctgtcagttgtagccttgtaggtgtgggtatgtgtttcaggttcaggggattctaattgttcatctaattcaacagtcggtatgtgtttcaggttcagggaattctaattgttcatctaattcaactgctcctgttatttctacgaaatgcacggggtgggaaagtgcccatgccatgcgcaaactaggctacaatgttcatatacgttgccacagggcctaatttctgcagttcgtcacacctgagtttcctctgtgtttttcttattacatgaagaacacctgagtttcctcttctttcctacacgataaaacgcacaacacggcacatgtacacatgttatgggccgagaggcccagaccaaggcagcctggcatgacatcggcccgagaggcagtaccggtcgaaggaacggtggcctcacggtacgtaaggaaggatcgtatcagaaagtgagtgtcgctttaactaatcaggatccttatctatgcgagttcaagttttaaacttaacatgggtattcgtatttatgactaatttttttagtgataggtaacatactcatcaacaacgaaatgcttgtggtgtggtgtatgaattagacatgtaacatctatacattaattacgcctacgactgtgagcattagcaaaagttccttaaaaatattttttagatttaagattcagtggaatcgttggtaatgctctaaggctgtgtttagactcaaagtttggatccaaacttcagtactttttcatcacatcaacatgtcatacacacacaacttttcagtcacatcatcttcaatttcaaccaaaatctaaactttgtgttgaactaaacacagcctaaacccttaaataaacgtttagggcccctttgaatcgtaggaatgaaaaaacagaggaataggaaaaacacaggattctgacaggaatacaattgtaaaacagaggattgcaaaacacaggaaaaacacaggaatggccgtttgattggaccacaggaaaaacgcaggaatcagatgagagagatagactcagaggaaatgttccaagaggttagacctcttgctaactttcctccaaaatgtgcataggattactcattccataggaattttaaaggattggataggattcaatcctttgtctcaaaggccttcataggatttttttccataggattgaaatcctccaaaattcctacatttttcctacaaatcaaaggggcccttaagagacgaaaactcgggatcccggagggacttgctgttgccctgttgctgagttgttgctgtgcacgatgccggcctgcgtgctttcagaattcagattgctccacgcaggcccatcgaagcttctttaattagcgtgcaacggctcgacttgaggaagagatgagaaagaagggattaccggattacgacgtggtggtcagtcggccggccggccgaggcagatgagagatggatcagtgcacggtgatgtactaccaatatgtaccgcacgcgcgccgccgctgtcccccaatctcgtcgacgtcgagacgtggggatgctggagctagctatcaacgccaacggacgcgtgcctgaatgccttgatgcggtagcctgagtaagctcgccggctcgccccgtagtggacgggctggcttgcggctgcaacttgcaaatcatggcatggccacaggggtcaagggcccaacgcacagtcgtctcgtccgcccccgggtttctggctcatatatgccacaatctgtggacaaaccgaacaaactccaccaatgcatcatcccctctcgtttcagcgtcgtcgccaacgaacacccaccggtaatgcgccctcctcagcagtcgcgccaaccgccacgaacgccgcgagcgtccctctctctctctcccactgctccacacgcgcgcggcgcgcccacgcatccatccatccactgcacacaacatacacgcaaatggcgcccgcggcgtacgttgaccccggctgcgtccaccgtccaacttggccatcggaccccgtcgccactcgtgtgcactttggttgaaaaatacgcggtgcagctcaacacgcccctatcagcggatcgcccccccccccccccccccccccccggttgactccactccacatgcagcgcagcttatagttaaccggggccagcgcggcaacatctgcacttgtctccctccgtgacctcaataatacgcgcgttccatctccatcaggatcagggagggagatatgagatatcgttaacaaatttctcgatcggtagtgctcacgtcaaagccttcagtcgctcagtcggttgagtgagtggttcagggcttgctacttgcttcctagtgtagctagcttgacttgatgcgccacagcactaagccggaggaagaatcccagcaagcatttgcacgaatcatctctgacagtgaagcttccattccgatttccggtgtcatcttcttgaaagtaaattttccacgtgtgatcttacctttgctttcgttttccacctgtccatttcgatcgttatcaggatgtactttaccccttgtgcgaggaagcatccgaccgtattgggggaggcaacaagatttcattcttaatgccatcagacagagactagaattctctgagatgtattttatggttatactatcagataagaggtcggctggaaaaagcgccaagaacagcgtgcaatgaagagacgatcaaacaaagagatttcaactattttattgcaaaggaaagagcttgatttgtgagcttgtggttggccatggtgccagggaagcccacctcacctgcagcctaaccaacgccactaattcgtgaacgggaaatctatccaatccataatacagaaggtgcacattctcatcttatcttttgcattaaacaatattactgatttgacttacgatcaggagaaggtgctcagatattggttgaccaaactactgctgcaagtgcttgagtttgtgtcattgtgtggctattttgtattttgcttgctgggacactttgctctttcagcgactaaactactgacatgtgcattaggaaatcaaggtatttgcaattcattttacatgcgtttgtttcgccgggccgcttcaaccaatcatgaatcttggaggggatgtggaattgtgagtgcgccagtgaccggctctttcggatccaagagctgatagagcctcagagcgggactcatcctctgcatcagtttccactttggcatagtcttaggacctgtttagatgggactaactatcacatcggatgtttggacactaattataaatattaaacgtagactattaataaaacccatccataatcttggactaattcgcgagacaaatctattgagcctaattaatccatgattagcatatgtgatgctacagtaaacattctctaattatggattaattaggcttaaaaaatttgtctcgcgaaatagctttcatttatgtaattagttttgtaagtagtctatatttaatactctaaattagtgtctaaataaagggactaaagttaagtccttggatccaaacaccaccttactccctacatttgatgttaaacacagttacaagttactctctccatactcataaatgaagtcattttggacagcgacacgatctccaaaacataactttgacttcttgtttctataaaaatatttattaaaaagtgatatatgtatacttttccttgagtccatcctctctgagggccacctttggtctttagctggtatagctatttttggggttctcctgggaaggtagtggctctgtccccttccagctatttggagttgtgtgtaaccgtcacagtagtttttcgtctcttctttattttagtcttttttcctcctttcttggcataagtcggtctgactgattgcgtcgtgtgacaaacattctattcttctaatatattgacgtgcaatccttttgcgcgttcgagaaaaaaatatatgtatacttttatgaaaatatattttaagacaaatatattcatataatttttacattttcaaactcaacaacttgagagttattcatgatttatattcccaaggtttgacttaaacattgtcctaaacgacttcctttatgagtacgaagagagtattaattaatcattccatgtcaaggcatatgcttatccttaagatcctccaaaaggtggtaaacaacagtgcaagagtcgaaacatggctcttcaagtcttcattgtctctgcctctccgaaaatgcttttttgcttattgcccttaaaaagtgtattattttgtttactcgttattatgcaatcttttttttttcaattcgatcctacaagaatggccaggtatcctagtgggccataacaacactcacgattctggatttttttaaaacctttctaaatttaatttttaaaaataaacccatcgaaagctcatttctagatctgaacctatttacaacaccaatttaattagcatggcaagaaaacattatcatctcggtgaaaaatcatggactggcaaatatttctccatgctactcgcgatggcatgacactactgttgtcaatgttgccttgcaacgctacctctagtagtgtggtcaaaaagcttgttttttttaaaaaaaaagttttggaactttaaatttaaaaatattcaaaaaaaactgtgattctgtaatcctgctataataattggacaaattttatgaagatcaactaagaaagcacatagtaattattttctttccgtagcacttctcaacgtaattttaacacacaactaatttcgaacaaacacacactcggctacttgagcaaccgaaataactagggatcttcacaaaggctttttctaaaagtgaaaagcacagatcttacaaataactgctaaattgtctcatggtcccatgtgctcattgttatggacatttttcgaaatgaaaattgcacatgaagtcatgaagcattgcaggccaaaacaaaagtgttaccagcagtaccaaatttggattcaacatcgcagttaaagataactgcgtataaaattccaatatatgtgcaaataagttacagcaatttttcacacatttccccccaacaaatcggtgcttacatacatcctggtagctgatgctaccaaatgctcaccattgctagctagtcacactactcactggtactcacaggcaaaacctaaaaaagaatggaatctacaaggctaaatgaaaaccaagaaaagggaagaaagaaaagaaatcaatagagattaaccaatgaggttgcacactggttaatgtctgtctaatgatgtcttctttttttcccatcttggttaaagaccagacagacgcagagttagtgcgcatgccactacgccaactctggcccctcggcgtcgcaggccggcgccttccagtaattcaagagcagcgcgccgatgccgcggccgccggagcgcgcgccgcagcggccgcaccgctcgccggggggcatctcggcggcgacgagcacgcggcggcacgacgggcacgacgagtgcgcgcgcagccacgtgtcgatgcaggcggcgtggaagcggtggtcgcactgcggcagcacgcgcacggcctgcccgtcctcgaactccacgaggcagatggcgcactcctccgcctcgccgccgccgccgtcggagacgtacgtcacggtcgggagcgaccgcagcacctccttcttgacgcccttgttcgccgcggcggcgccaccgccgccgccgccagccgctgtcccgccgccggcggcccgcgcccagcggcgcgtgcacgcgcaccgggcgacgaggccgaggccgaggacgcagatgagcgcgcagagcagcccggcgaggatgacgacgaggtccgagttgagtgagtcctccaccgagccggaggcggccgcctcaaggagcattctcgccatggctggcacaccaggagatcgatcgaatcgaagaaaaatggcgtgatcaagcgagccgcgagctagctaagctgccgagcagtgtgggagattgagcagcgcgagaggcgtgtgaggtagtgtaggatggggttggtttgcttgctttatatagagctcccgcgggcagttgcttggcgacttttggtctttgaaaaaatggatggaattccggggaaaaaaaacaaaggcataagtcacttgagacttgagaaaatgagagtagtaggacctctgctttgggctcccacactttggcggaagagggttttaagtgggactgataatgctctctttcgatagtactactgtatatctcaagtcacaaacaaattaagcggaaataccttctgtccgaataaaccaaacgacatatttacgaacggaaagtaatttgtaaataaaatttttttagcgatctaaaagtaaaggctaaaaaaataaactttaatgaaaaaaccctaaaatcagctttaaatttaagtttaaaaatttaaattttggctgataattataagcataaacgaaaagatgaagctattctactcttgctgcaccataaatacaattttctttttagaaataagcacaagggtagaactaagagaaagttctacatttcagatacaatacaattagcaccggtgcaattgcgcagggaactactatagtataattgtgttttgctataggcaatagtaaaatagcagcatacatcgacttctccaatgtgctaggtcaaacaaattaaggaaaagcccattttacaacttgaaattccacgaagtttgaaatcgagccttaactttgaagccatatactcctatttaatttcaacttttaaaccatccaatttcagcctactcagaacaaaactagttttgaatttaaaattgtataaaaaaaaaccagtttcataagacagatctgcaacctacatcacttggtgcaagactgcaagcggaccacgtagccacgttagtgacgtatcattcaaagccactctaaaataggtacaaggttgaaatgaacagcctcttagaacattaaaagtttttttttcgcgaacgcgtaaaaggattgcacgttaatatattagaagaaaaatagttttatttatacgacacagtcagccagaccaacttatgctagggggagggagaaaaagcaaatgaaaaaagttgaagcttagagaaactacgacggctagaaacagaccccgagtagcgggaatgggccaaaccacgctacactcccaacaaatccctaaaagtgacgacgccagctaaaaatcacacatggcccttctaatggatgaacttcagaaccactgagatggttaaaagctgatagtacacggttttaaatctcagaatcgagatttagactaacattgatttatggttgttaaaaagaaacttcctcatagaggaatgccacgaactaaagccttgattagacacaaaaatacattctaaatatttcacttgtctcgtgagtgagcagcataatagcatacacccaactctcaagggttccagggaaagatttatgcgattggcactataatccttagtagtagcacccacaacacaacccagagagtggaacacttttttttggtagcaaaaggttgcgagcaagggacagatgtccgagccaggagccacacgaaacaatcctggtacagatactttcggcgtttctctcgctacatctacatgtgtcacgctgccacagcctacatgttctctcatgcgtgcaggcaaccagcttttcccgtttatgctagtggtggtcacgcttgggcatttcccttccctcaccaccgttctttttttctcttttacatggcgtgtgtgcaaaactgtgcatggccgccgcgacccgagacgggaaacacgcccagaggacgcacattctccccctcacagaaagcgcgcagaaacgcttgccgggttgccgctccaaatttgcgacgtggggctcgttcgatatggcttgagcctagccgaacaatttcggcttcatcttatttgcgacgtgttgtaccggtgcgagatgcggaaaggaacaccggtgactactggtgatgagccgtgagatattcgaaagacgatgcgatcttgctctcgccgaggacggcttgccgagagaatttctcgcctttcagtagcctccatgctgcggaagtacgtatagtcccttttttgttgtagtggtgcgagagcccaaaagcagccacttcgcacatggcagcggcgcctttccgcagcacatatcactatatcacatggggggcgaaccaagcgtaactgaacggtaggttacacgagatgtacgaatacgacccagcggtaagcagctatgcacgcacggctgcagctcgacgtgcaggtttgcatgttgtatcttgtatatgctatgttgctatgcacgatgggagtgtgtttcatgtttgatcgatgtgtcgaggtaatagcgaatcggtgatttgggggtggatgccacttttcaagcctaagctaggcactgagccacacacgatgtgtagccgccttagggtgggctttttggagtgtgatcaaaagctagcacagcgccacctttctctcggatcagcgtgacggttgttgtggacgagaaacagagagccacgaaactacacaggtgcgacacaacagaaagatttttcacctgaagcaccaaattacacttttagaccgagtaaaactgggcacttccttttagtaaggtaagccgaattgtataatagcatatagaaatacaattaggaaataaccgaaagtcagaattaaaaataagaaatattagaagtagagtatagagtctatatagaaatacaattaagaaaaaaatagaaatttggaattaaaaaataaggaatattagaagtagagtagagttcatattgaaatttaaaaccaactaaaattcggaataaaaaggagcctccacgttcgctctcatggcttagaaattctcacattaatcagagaaaaagaaaagagcagagtccatatagaaatacaatttagaaatagctgaaattcagaattaaaaaataaggaatattagaagaggagactagagtagttattacacattagtagttttgaaaagtcattgcaaaatttaaaattatgtcgtcattgtaatatattttaataatataatgagaaaacatatatgctattatataagagaaaatataatgatgctagccgcgcaatctgcgcggaccaccatgctagttgttagtaacgtactaagataaaaagctatgctgatcgaatcatctgaaaaataaatggtcgcatatgaaggagataatatcttcaccttaaactattgtcaacagtgaaatttgaattatcacatcgccaatagtcggattcttgctatattcggttaaggaaattaatctattaaacaaagcttatcaaggaggatacggcatgacaagttatctattaattaataatagtttattagtttccttttatctctaggaaaatatgtttagtgtcctataaggactttatgtattccttttatctttaggaaagtttctttcttgtactacaaggactgtatctccccatgggtataaatatgtacacccggggtcattgtaagatctctctcacgatcaatacaattcggcgcatcgccaccttttgtcttttctactttattttatcgtccgacaggacttagcacctgacgctgggctgcatcggttttgatctccggcgaaggggtaaatccaatattccaccggcccaggcaatcgtatctacgtcggtgttgttcaaggctacatcagtacattcgacctcttggattactctggtttggttgatatatttgcctggttatttatcatatgtcttagttaatctagtcttagtatctcaatttagctatatcggttgtctctcgctttaggcggaactctatcagttgtctctcgctttagggtttccgtcggtatcggctaaattgttttactagattagattagctaaggcatctatcaccctgaaaattagtcaagggctcgattgtctagatattatgtttcttttcataattagtgatgcatcagttaagtttgatctaccaagttgtgcttagaaccataatctctagcctgcttgttgactgccaataagggtttcctcggggtttcagccgatgaattatctggacgttgcattggcttacaaggattgcatataagttggatttagccgataataacaaaggctttactgtttaatctaatctcgtggattttatggcatcggacctccagctgatgtatgctttaaccttcggatcagtgctcattctatcatattattgctagccaactggtttctactggatattattattgttatattatatcattatcagtcgatcgcctttatttatatcaagtgtcagattctacatcaaacacataaccgatagctcaaaaccctatcgctatcggctaatatcgacatcggctagaactactctatcggcttgtcagccgatcgacaatttgatctactattttcataccttgtcagttgcaggatcaaactgactagcacgcctgcacctcaccaagatttggacctgcactagagctaagcagatctcccaagccagcgtatgtttttcacgtcaacaactatacaaaggaaaaatatgcaattttcaaacttgaactgttgaactcatggttaacctttaattataaactttcacgtgatgcatatttgcccctagagaccaaaaccacctttgttttcacctcaaaacctcctcagggcaacaacaatgtatatagcaaaagtagtccatatagatgggacccacatatatagactttaactattgtaacattcccaatgtatacagatagcaaatagtattaggaggagagaagaaatagagacaaataatatattttatgctctatgggcagcccatatgcttatggttagcttttgttatttctttgctatggactagttccacaatgttactagctagttgaatgaaatattatattgcatatgaatgaccacttttgaactctattgtggatgcccttacatcctccaatagcggacaaactaactctaaactaagtggcgcatatttttttttcttttcctatgattaataatgataattcacgtagaattagatttaatatacaaccctgaaaatttatttctattagcaaaatacccatgtgttgctatgggtaaaagaaaatacattataatatgtcatagagatttttttttatcaaatatgttagtaccacttatttacttatttaaatatatggtgtttacttgtttgaaacacacactggactattccatgatataaaacttatacaagttataggagtggtggagtggcaatggcagattcactgctgccaccactagtgttttttaaaggagtatatataggtaccattacatgtagaagtatatttagattttgtatacaactcttaacttctatttatataggtttagttctcatatataactcttaacttatagaaatctatttctatagttataattgtattttgtatgccgttacaattcaaacccatcatgatataacagttaagatcttttttctccgattaatgtgagaatttctaacctttatagctaacatggtgtctcatttcaaagttgtcttgataatataataaatagattactaggtcttcaaaaaagcggagaaaaatgacaatatgccactccattcggtgggtctcgacaaaatgccaccaactacaatacaaagaataaaatgccacttaataggttactttcaggacgttttgtcactttggaggattttaagaccaaaatacccttggatgtggataaagaggaagagggaggagcggggaaggttgagcccgacggagctcatgcttccccgcagcgagcgcggggcgttagctgcgacgacggacggggggaggaagacaacgacgctgatgggaggaggaagacaacgacgctgatgggagagacgacggcgatgatgggtggcgaaggacggcgactgggggatgagggcggcgccgatgggagggaggaggaggcgacgacggcacagagggctctccagcgctgcccacccacgcgcttgtagcttgccgcctccgacaccgcccgcgcgcgtgctccatgcttgctgcttctggcgccacctgcgcacgcgctcactgctcgcctccttcggcaccgcccgctgctcgcggcaccaccgtcctcctccccatcgtcgtccgtccgcacgccctcaccacccatcgctaacgagcacagacgccgccgtctcgatgttccctggtgctccccctcccttctctcttcctctcttcccagggtattttggtcttaaaatcttccaaaggggccaaatatcccgaaaataactcagtgagtggtatttcatcctttacattctagtgggtggcatttcgtcgaaatccaccgaatggagtggcatattatcctttttctccttcaaagcgaaggtggtctcatttttagctatacttagagtaaattttattttgcgcgaccttttattacccgatatttcattttggaccaccctttaacataggttttcactttggaccaggtaatcttccctttgttccactttagaccaccccaaccctcttttccatcatataaacaattccgagtacaccggcttcctactcgtcaatgaatacccacggttacatctagactattgctttgacatatgacaagttgatgcatatagataaaatagttgagggtagtccaaagtgccataaatgtaaattttcccggttcaaaatgaaatatttgtttggtttgaagtgaaacaatgttaataaaaggtgacccaaaataaaatttagtcctatattataaatactagtgagcgagcacgtggaagacacattgatagatataattgagaaaaaatacggttattgttgcttatttactgatacattattaaagaatcatagtaggaactaagtaaaaaataatattattgtaagcaatacattgttaattcatgaaataaaccttaattgtttattttgttacatgacaaccaaatgcaaaaaagaaaatggaatatttatttgtcatcatcgatttcacgctcactttaagatcagtccctcttaggagatgaggtagtgtcagtgtcgctcggttgtagattgattgccctgcatcttagggcaatcttcacctgattgtggaggaagatatcgtttattaggtcttctcgaacatctggatgcacatgtatataatatgatgcatttagtattatgttagttgctacattgaagcagcagaaatgaaatacgttatgtacctagaagaggaccgtacatcccactgtctggccatagcgcaaccggtaatggttgtattggtcgtactaaccagactttctgaaaatcaggtatagactttctgaaaatcaagtatagatgatctatgaagcattttataaatgacatatatttattctataaaatgcttcatagatcatctatacgcgattttcagaaagtctggtccgtacgaccaatacaaccattaccgttgcgctatggccagacagtgggatgtacggtcctcttctaggtacataacgtatttcatttctgctgcttcaatgtatgaactaacataatacttaatgcatcatattatacacatgtgcatccaaatgttcgagaagacataataaacgatatcttactccacgatcaggtgaagtttgccttaagatgcagagcaatcaatctacaaccgagcgacactgacactacctcatctcctgagagagactgatatgaaaatgaacgtgaaatcgatgatgacaaataaatattctatttttcggcatttggttgttatgtaataaataaacaattaatgtttatttcataaattaccaatgtattgcttacaataatgttattttttatttggttcctactatgattatttaataatgtatcagtaaatgctcaacaataaccgtattttttttctcaattctatctatcaacgtgcattgcacatgcacgctcactagtaattatagcttaagacagttttcttatggcaaaatttactaaaggacacttcaaaattgtgtaattagctgtgggacatccgaaagatgtaaatttgtccgaggacactctaaaagtgtggtaatttgctgcaggacattgggcatattaaaatataatatccactgaattgatgagagagaaaccacgtaaaatgattgttttgccccttctcttcttccccttcgtcttccccaacactagctgcctagcgccattgccgatttccgcttcctcggtgagccccgcatcgattccttgcacctatagcctccctaggatctctttaactcgttgggcatacatgcatggcagtccattgaaggaatcaagccgtcgccgttcaccatgctcagcgtcctcgtcatcgcccacaccgccgcccatgtcgctgcaagagacgacatcgaggtcgtcgctcccggaccggctcatctcgttctccactgccacgccctcctcctccccgccgctcggctgctggtgcggtggtgactgattgggtggttgtggggtgcaggcgatacgggcaaaggatctgaacgagatgttcccggtggccaacgcggaggtggcgccgatgttgaacccgcgagggttcgcgaacctgctgtggaagcagctcaaccacctcggtaacaccgggttcgacctggcgctgttccgcgtcaacgcctacagcaacatgctctacctccatgccgactccacctcgcctctcacgtaagacatcgaccactggttcccctgtgcccgtaagaaacacagaaattgaacgaactcatcccaagatccgcttcgagatcattcattcgtagatagggctgagggcaattttgtcgttttgaaatttctctcccatctttttatcagaaataataaaatattgtctcgggtgtcctacagcaaattacatgaattttgtggtatccatcagcaacgacacaattttacagtgtctcacaaccaattacacaatttttgggtgtcccagggcaaattttgccttttcttatatgtcgtctccataaaccccatctttgaattgctgcatgaatcatacgcatttggagctaaaaacgagttgaacacaaatagtaaaatgttttttttcaaagaactttaacaaaagacatatttctcacgccaaaaccgttataagtcttttcttttggcatgctctcttattacctgcatcgtcataaatcttatataatcaaaggatatatatagctgatgccatgtaatttcagatggctggaactgcaaccgtctggcatggcctctactctcttcgaacaccttgcggttcaccttgggtacgtactaatgtactatagtgatctttccactccttgatagttggattacgtttccggctgctaattaaagtcgtgcattcagtcgtgcataccgcacacaaattgttacatcaagattcaagacccaccaagatttatgcgacgggacctatcacggtatcacctttcacattgtaggctggatacgctgatttcaggtcagattccgcttgataggcacatcacaggatggcacacaccagccgccagaaaaaaaagctttgcacgagcttaaagcgccaacatggaaacgtggttgctctcaggacacaaacagttaaagtgtttcctgatcccaagtaaaaagacggccgagaagataccatttcacgtggttgctcttaggacacaaatagttactgaagctaagtaaattgatcgactcctatttcacgttcgagacccaaaagaacaagaaaaatattggagtatgagtgaaatacagacttaagcttttggtgaaatggtttgtgcgctatctcacaaattgcactggctggtttaatcatggatggaggaccaaatctgaaggaacacttgaagcatgggacgaccctgccttttcagggtgcagatagaatcgaaacatgtgcaaaacgagcttttggaaaagaagatgctaataagcgcatcgaatcgaaggtgattatgactttaaaaaagggcgccagaatcaaacatgacgaagtatctaggataaagaccctggttttctgataagataagatccgtctaatacagtactaagtgactggtactgatggcaatttttgtttggttctctccaaattggagttactactacctaaagaagagaacgcaccagtaaaaactaaaaagacagtcgagcagaaggctctttgcatctgtaataccaccctccttaagaggatacaactcggtaccgatctgcgataaactgccttctctttccatggggcaaacggcagagtgctgataaaggagtatgcatatgagggctaggccattctttacataaacaaggagaaaagtgatagggctattggttcaagtatctcaggcttcctttgaatagaggtttttgcaggcatttcgagggtgtatctaaaaatctgtcgcaagtttattgcgtaaaatttttcaaatgtaagtatagtacaattttagtgtaattacattgcaactatactaaagttacagtgtaatacatgtaactaatgaaaagcatgcatatctcagctgttaaggagtgcttggtgcgaagcagggaccctgagttcgatccaccggacccacagcgcgccttcacgaatctccgtgcacatcagatggccagaaaatcagaagttgccccaaaataaaactgttggaagtttttttagcgaaaccgttccaaaaggacagggagagactttagacaaaggcatgcacaagtgtacaacgccaaccaacaaataagacggctcatcgcaccttttagtaatgtgaatgacagaatgagagaagaaaggtagataagagagacgaggagaaggagactggccctatagatggacaggttcaggcaaccaagcattagagcattgggggaatccccccgtatctattaacaaataatttcagtctgctaaaatgagagaaaaacgggcacctaaacattatgctgtactgtgtttttgcaaacttgcaacagctgggatacgtaccaatgttcagatgccaagtattcttgccatggtcatgcagctgtgtttcttgcagtgcttttcgcgcagatgaaacttctaccagtttatgcaatttaaaatcgcatatttgcatggctgcagttccagatcaacaaacatgttagaactaaaacaaaaaggagataagaactatgaataatcaaagggataccagaaagcagcctgcacctttcccaatgttatgttccgaaagatacacaatattactgaaggtaggggtgctaatgggtggaaatccaatccattactgccccaacccacttctgtaacaagcatccttccaattcaacccagaccacttctccttcttcaagccccaaaccaatccaacccataaaaagttttgaaccaaacgagtccaacccattctagttaagtgggttcaaccaattctaaatccatggactgaaaccgcagtgtccaatccttggttcaactctcttcacgcacgtacatacatatacatgcatgcgcatatacatgcgtgtatactaccaatatacacatgttccatgcatggatgcatatatccactttagtatcacagaaactttagtatcacagaagctgtggttgcagcgcccagccgaccaccggcgccgccacagagaactccggccacatgggagcacctcctccggccagtggcggagccagaaattatacaagactaggcctaaggtagggctcgactaatggagtattagttttatgaaaaaattacatggtgaatcaacaaaatttaagcaagtttttggaggcaggccgccctaggcctgcctccgcccctacctccggccgccagcttccatgtctccacatttttgctgctgtctccacagagcagaggtgacgacgtcgtcatcgttagtgccaatgatccgctgccccatctggggctaaggccatggaggccgacagctaccagccacctcgtctgcagcgccgctggtgacatggtggcccagaccaggcaggccaaggttgaggttgaaacccatgccaacgcacccctccagcagcggtgccgcaccgagcacgaacagcgagtcagagcagctggcccacatgctgggcagaggtcgccggcggcggcggcaggatgatgatgatgagccggtggtgatctcgccgccatgctcctgccagcggttgcaacgagtagtgacacagaagggtgtgggaggcagagaggaaggtggcaagccaccggcggcgtcaagcgaagtggtggtggtgccgtggctgtcaatgtcataggaagacgaatgtgatttggggacaatccagtggaagcccatgggctgaatccactttctacccaaactttcctaaccaaaaccaatccaatccaaaccgttttacatctccatccaacccaccccagcccattagctgcatcaatccatttcaacccatccaaagccaacccacactgaaatccaatccattaaatccattaggatccaatccatgagcaggcctaactgaaggcatcaaagttggcaaagttgatgatgtagtagcccctttttccctgaaacataacagaaatgcatgtaacttcactattacaatgccattattccagtgggtgacagtgtctcatcaattcagactagctatctagtttagtttgctacttgcaaaagagctcctgagtatgacttttttttgagagagagagaagctcccgagtatgactttactcacactggtgttcgggcacgagctccagttaggcagtggcaaactgacaacataatattacaataactgaagtttgtaaaacagaaacaataagaaatgcaagaaaccaaccttcaaagtatttttctctttctgacaattatgctcagaaattgacattttctacagttttatacagtttgcacccccaaaagcatgtctcactggttaagcaatgaaagactgcataagaaaccaaattatcagacacatcatcaggattcaggagaaagaaaaatcaggacatgaataccagttgtacttctcgcacaacattttgggggaaaagaagcatgtgaaactcaaattccaaggtagcatcaaacctgcaattttgtggtaccccccatgacaatgccccaaatctttttaagcttggtggcatagacatataattcctccagtcttccattatgactcttagatcatgaagtttgctctgtaatccaatgcaacagtttgcatgcatagtgcaaaccttgtttaaatctctgctgggttcacaaatgccaccaaagtatgtagtgcttaggaacttaattttcagtccaatatctgtaatgtaaggatcatgctttataaaattaaatacatcctgatcatgatagccaggatatctcagtcgcgaagaataccaaaacttgtagaattctatactttgattgtttgacctcacatagttaaatcccccgtttgctatgttccccaaatcagttgcattgcctacatagtgatcacatgcaatctgaaaatctccatcaggatagaaatgaggaaaaggattgcggaaccacgtgatgtctgcatcctgaaatgcagataaaaaatatgtcaggtgtgactaataagaaactctatttcagcttcacatctgctaatttttcaggaaaatatacagccctatgtgcgtataaaagctgattttcaatatagataggacacactcaaaatgcaattgactttaccgagaaaatgaagctgtaacctttttcaagaactagccgcaagaaatccagccttttccacatcatgtccagataaccagcagtcagaaacctcttctcttgagaaaaatccacattctcggttgcaagagcaaagcagtatgcgtggatcttcatacaccttttgtaagccttccaatcaaatgttattatcacaagatgtctcaaaagtgagctagtcctaacaccacggcgaaaactgtcgataaaaagatcaatgaccgagcctgaagaagcccatgcagcattcagtgttgtcaatataatggtcttattatccatggaggcctcctgcagaacttgctcaagtttgaggtcgtcactgtcctaaaagaaaatgcaataagccaataatcaaaatgcaggtctattagctctacttgatctgatgatctctcgaattcaatgacatatcagacagcagtgaaattggaagaaattgcatccgcaaaggaaagcagcaatatactatggcttattgttcacgaatctattagttttcagattttaatgggagaacaaattattggatgctatgtatgataagcattcattgcagaattgatatgacgaacagcatgaaattttgacccgtgaaacaaatataaggaatcttgacccgtaaatcacaatgacggtcatttgattattgttcattactgcaatgcgtatctgtaagtcatagtcgattgaatcagttaatggagtgtcaaacaggatcgatgactaaaaataacctcaaaagcgaaatgagtagaagtgaggtataaaccacgcgattcactaacaacggcacgcagaaaacctatatatatatatatgctaagcacagcaattcgcacctcagataactagaaccgctacagaaaaactcagggggacaaaattaaacagcagaaacgacggggaggaggaggtggaagcaaagcgcaccagatcgtcggccgcagcgggatcgacgtcgccgtcctcctcggggaccacaacagcagggggcggctggccccgctcccaccacggcccgcgatcccatcccacctgcaccggttggaccgcgtccaacaccgcggcgcggtacagcacggcacagggcagcgccacggccgccgcgagcaggagcgccgccgcggctttccggagagccggcgcggacagcggcagcgacggcttcgagtgcccagggaagtgacggagggaggtggcggacgtccgtgccacggtctggttcggcaacggcctcgccattgcgagagcggcggcggcggcggcggcggatgaccacgacaccgacgcggacacgcggcgcggcgggggacggggaggggaaagtgcaaagcggcagcgtaacggtcggtgaaggcgtaaactcgtggtttccgtaaacgcagcgttaaagcggataccgcctacgggagagagagagaggggatagccgctcgcacgtgaggcggccgcacacgcgggctgccagatgggccaccgcatgcgaggtgtcactcgcgcggtgcaccgctgcaccatcaccgccttccagtctccatgaccgatcgggcccactcttggtcgctctacctggccccacatgtcatccactcgtgctacgcagcagttgagcaatcggtgattaaaaaaaaattccacacccaaaccctagccccgcaccgatccctctccctctcccgccgccaccgcctccgcctccgcctcccctcgcgccgtcgccgtcgccaagagccgccacttccgcttccgcctctgcctcgtccaagtccaagccaactacctaaacctaaaccctattcttcttctttcgcctccgccgcgatgtcgtcggagcctccacccgatgccgccgccgccgccgcctcctccgcgggggatctcgcggccgatctctcctccgccaccatcagcaagaagcagctcaagaaggatgcgaggaaggcggagaaggccgagaaggcgtcgcagcgccagcagcagcagcagccgcaggccgacgccgacgaccccttcgcggccaactacggcgacgtccccgtcgaggagatccagtccaagaccatctccggccgcgtgtggaccgagatcggcggcctcgacgaggccgccgccggccgctccgtcctcatccgcggcgccgcgcaggcgatccggcccgtcagcaagaagatggccttcgttgtgctgcgcgagagcatgagcaccgtccagtgcgtgctcgtcgccagcgccgacgcaggggtcagcacccagatggtgcgcttcgccacctccctcagcaaggaatcaatcgtcgacgtcgagggcgtcgtctccctccccaaggagcccctcaaggccaccacgcagcaggtctgctctctccaccattatgttgggtcaatatgatcatcaattgcatttgcatcaacccttggccgcagttgattagaatatgcattcggatagccctcttgtgatagctctagaatgctgaatatttcatgttagatgatggttctgcaatcgattggaattcacattgtgatagtcctcttatgatacctcttggaggctgaatattcatgtatggtggtttttgttggactttttgtatccatcttaatttaccgtcacaattagctcgatttaatcccgcaacataacttattatacggtgtgcacatttaaaactgtgctttgtttcagttagtactagctaatgaagtgtcttttgtttttgctggcaggtggagattcaggtgaggaagatctattgcatcaatagggcgatccccacccttccaatcaaccttgaggatgcctcacggagtgaggctgaaattgaaaaggctgaacaagtatgtatatgtgcaacttgcttgtacatccacaatgtatatttacaggatgcctataaatattataatcattgtgagacttaagaaattaaccactgctgccgtttcaggctggagagaagctagttcgtgtgggccaagatactcgcttgaactatagagctattgatctccggacacctgcaaatcaagcaatattcagaattcaatgtcaagttgagaacgtgagtatttatttatttatttttactgttatcatttttgtattagtggattgtattgtgccaacgatgctatgtgatctatagctcagttaacacattaaattttccattgaataaaaactactctggcaaatgttcatgctttcagcttagtcaatcttgcagtaataaacatttgcctcttgggaactaagctcaaactttgcacaagttattgctgtttggagatatactgatttggtgaccccaagatgttcccaataatctgtgccttgcaacttatctaattgcacttgtcaagggttagattcaatatgtttgtcttgagtgaaggccatgcgtgtagtatatattcatgtccaagccttatgtaggctaattcttaattcagtggaggttaaacaacgagcttctattatgttttctatcgcgtatgagcgtgttatattcattatggaaattaaatcgttgtcatgtattttgcagaaattcagggaatattttctgtcgaaaaattttgttgggattcacagcccaaagctaattgctggatccagcgaaggtggtgcagctgtattcaagctacagtacaatggacagccagcatgtttagcacagtctcctcagttgtataagcagatggctatttgtggtgggtttgaacgtgtatttgaggttggacctgtttttagagctgagaattcaaacactcacaggcatctgtgtgagtttgttggccttgatgctgagatggagattaaggaacattattttgaggtaaggaaaattggatgaaagatgctttgtattagtataagcaaagtgatgctgactaagtgctgatttctcaacacaggtttgcgacataatagatggtttgtttgtagcaatatttaaacacttgaatgaaaattgcaagaaagaactagagacaataaacaggcaatatccatttgaacctctgaaggtgaacaagttcttgcctctttttgttccccttttataatattatctaactcatattttgatactatattagctaactcatattatgctaattcatacagtatttagagaaaactttgaagctcacgtatgaagaaggaattcaaatgctgaaggtaaatatcttgtttcagtcatcatctctatgttacctcttatttggtatgggtgaatttctgaacatatgtctgatctattgaatgaaccatattctagctgagggtaatatatgattttcttgttgggccttatatgagaaatctactaatggcccaggtttttactgagaatcctaaatatttcatgagcataatttacatgttggtatgcacattgtgtattttagcaatttaatgtagttcacatctttgttgcaatttggacctactgacccagatattggttggtaaaagcttcagtcattgcttcatcctgaaatagcaaccttgacattttcagtcatagaatcttaccaaatagatagatttgttggacattttgacagatgttcatggactaagcctagtaagctacctacaatggataccaaagaatcttgtctggtaatttggtttgttaacattgaccaattcatgacattaaacggaaattatttttcaaaaaaaaaaaaagaacagtgatgaatcttgatcaatcaaatctaaagaatgggactggggagagattcaaccccacagtatttttttttagtacgagggaggaagtgagcacaccaaccgtgttcgcagctcactcaaatttgatataatgaaatcctgtttttgctaaatatctagtatgttagaaacatgttattggcaactttgaagtagaacaggtgtacaacttacagatatactgggttatctgggtcgtcttttttagtaaaaccagatttaattgttgaactaattttttgcttaggtgttggcctaaaatgctttcacagaattatatccatagcgattaacatcgtggtttgtcctggcaggaagctggaacagaaatcgaacccatgggtgacctcaacactgaagctgagaaaaaactaggccggcttgttaaggagaagtatgcaaattcagcctgtagttacttattcgcttcttttcaaaagaaaatgtggtttgacaacttgctacattgtctgtaggtatggaacagaatttttcatcctctatcggtatcctttggctgtgcgtcccttctacaccatgccttgttatgacaacccagcttacagtaactcttttgatgtctttattcgaggtacgtaaatttgtttatttctttgagatgtttgaatttattacagtatatttcagtgtcatgcatgcatgtgtgaggataatgttacctgagcaggaaaacattattttcagtcctgctgcttataaatcctttgtattttagagccatattgttgtgaatcactatcctatatgaaattagtaatgacttccacttttcttcattgcatagtctgacacgcaaaaagatagataaaaatcatgacttgacagaaagtaaaccagaatatgctctatcctgccaaggacttgaattcgccacggggattacttaggatggcacagaaatgaccaacacctatttttagttagtcgcttaaatgcattccatccaatatgatgtgctaattggtcctgacggttagcttgattgagtgtttgatggtgcatcctatagccaacctaggtctgcacaaccacattgaactttgctatcaatttaaatttagtgaaaatttattcctttattatagtcgtgtttgcgtcatcttatctacttccatcagtagtcactatttgctatcactgaagaagatattcatcatgtgtagaagcatcctgttgaccatttttgtgatatgataggagaggaaataatatctggagcacaaagaatacatttaccagagctattgacgaaacgtgcaacagagtgtggaattgatgcgagtactatttcatcatatatcgaatcgttcaggtaagtttatttgtttatcatgttgttagtcctctaatattgcaacatatgttgtaatgctcatccaattttcttcttgtcatcatctaaatcacttcattcaactcatttcaatatatgggtcatcattgtagctatggtgcacctcctcatggtggttttggtgtcggcctggagagggtggtaatgctgttctgcgccctaaacaacatcaggaagacatcacttttccctcgcgatccacaaaggctggtgccataatttgctttttttcccaagagcaaggtttggactcagtacggactgggcagttttcctcggctggtttttttacctggacattattttcgtatttattaatgtgctgtactgcaaaagctgctcctttccacaacatttggaatagttgccgatacatttggaatagggctcaacgttggcgttgtgatttcgttgatgattccgctattcgtaacaatggcgaatccagagcagaaatgaccctatgtcagaaacatatcacatactcgtatgcctatatttccaaaagataagggattatggaaggatgacatattcaagtcccaaaatacaaggtgtggtttgactcgtggtcttcaacatccaacttttgattgtcattttctgtcatggtaccaccttcatcctaatttgacattctctaagtagaaggcaccaataccaagaaaagtgtgaatgacttatattttaaatattggatgtcattgcaccattagaaattaatcttgttggttgcatgtaacacattcaatgatgcacattactcacattactctttgtacaaataaacaaaatgacacttgtttaatgatgatcattttggaaagaccccagaaaccttatgggatgatcaaagtgggatggagggatcatattattatccatattgaaaccaacttcacatgtaaaagaacatcaaaatatgaatccaacaagaccgtatttatatcagtaaacctacacattatatattattagactagtggttagaaaaatttataaaattcaaatcttatacgtgcgtaccttacagttcgagatgtcgaggtggagggagtaactatcttaggtcattattacacaagatgtaatgaagtcacttgtttatattgattcctagataatcatcataatctataccacttttttttcaaaaaaaaaaaagtaatggtggtagcagtgaccaccacgccatcaataacatgtgatttctcatatatacatcttaaagttttctaaaccattttaaaagaaggtaataatgaaaccatcttaaaagaaggtaataatggtgacagtaaatctgttatcaccgtcccatcaataacatgtgataacatgtggtttctcatatgtactccttgaagttaaataaagaaatgagtaataggagtaggttttgttttaactagagagagaagtgggtagctacatcaaaatttgaacggtaggatttgattttaggatgaatttaaggttttttttcaatctcttttcataattattaagataagtaaaagaattcataattttattattaaaaatcaaagaacaaaattattgtatatcgactaatatataatgatgtagccatatttattttctccacgtgaacatgtaatgccatatgattctcttttaatcccgtaacagtgtaaaagcattctgctaggcaagttttaatatagctaatgtataatatttaatcattgtcacaaatgtagcaacctacgacatgtaaaatataaccgaaactgtctaaactgtcactattattatttgatctattattatctgatgagtctacaaacaatctatcccgagaagataaataaatcttcatccttacccttaatttccttaaatctcaagtgcatgtgctacctacgtatcaaaatatatgatgttatatgagatgtacaaagtatgtatgtgcttttttttttagataatgatgtatgtgcttctttaaaaggaagtaatagtaataataagtgatgaatctacaaccactcctaccaccaactccctacctttttagaaagtaaaatgacacgtaggtctagacgatccacgtgttaaccagccccaccatcattttctacatacataatctcttatttttttatacatttgttattgacatgtaggcagtagcatgtggcctgtatgaggcgggggaggggggtggtgaagtgaacggtattaaaagtttacatgtaggcacaatgtgaccaaatggcctacatgtcaataataaatgtataaaagaataagagattatgtgtgtagaaaatgatggtaataacggcttaatgattatttatttaattaatgggataagtacattttactctccttaactcttcgttttgtctaaaatgcaccctcgatcttcaaaatcgggtatttaacacacttaaacttttaataccgttcacttcaccccccccccctcatacagggccacatgtcactgcctacacctcttcttctacctccatctcctctcccctttctcttctctctctatatatatccttcttcttgacagccaaacctccatgcgctagctgctgctgcgcctctctctctatatccttcttcttggacggccaaacctccatgcgctagtagcgcctctcctcagtcaccaccgacctcggtcactggttattcctcgccgacccccactactatagctcgtcggtgaccaccctgagctcgccctgtgtgttgcagctcacttcccagatatcgacgaggagagcggcgtcgcggtagacgcactgtagtggtagcccccttgagctcgacgaggagagcggcaacggcagcctccccgagttcactgaactggactaagagagcatagggcaactcaggctctccagcggcatcggcgagctcaccccaagtccccatgcacgtggatctggcaagctctggccctcttgcgtggttgatgcctcaggaccccaaatccacctcaaggaggcaagtcgatttgtcgtcgcccggatctacgtggatctaccgtcactccatcgtccttgtcagtggcgagagagcggagggagaaaggagaggggtgatgcgacgacaaatggggacggggacagatcgagcagctcactagtaaattcggtttccccatcaagttagttcgtcaccgactaccgcggcgtcgccaaccgtcaagtagatctcaagctctgtctccctctccgacgatctctaccccatccattattgagcggcaccacaaaggtcgtcgaggtggtggtgcccgatggatgagagaagaagtagaaaggagagggtggaagatgggtgtcccctacatgcccaaccttttttttatgtgtcaattggaccaccacgttagttgcatataggcaaagccagcatggtttgaaaaaaaaggttatttattggtattgatagttaggaggtgtaatatacccagttttatagtttgggggtgtgatttaaacaaagacaagagttgaggagggtgtgatttatcggcagtgtcatgttttttcggtgtcctctaaccaattacacaggttttgatgtactgtagtaaattttgtctttaaacaaatatatgagttgagaagggtaaaatggacttatcctttaattaaaatttgagtaaatttcacaaaacaacaggtattctgatcaaactatcgcaaaactatatatttaaggcgttatatcacaactacagatttaataccatatttatcacaaaactacatatttaaggttaagtatcacaaaactgtatatttaaatctttttttacggggaactgcatatttaaaattgaagttatcacaaaactatatcttttagagtttaaacccctagcaccattattatgctagagctataaacattattgttttatgaccaaattggttctaaacatatagttttgtgataatttagttaccaaacatacagttttgtgacaattcatcttaaacgtattctgcgataaatttagtgttaaatctgtagttttgtaatagtttagtatagtacatgtagctcttaaaattttgttgcaatcgcacgtgcagtaggctagtaccagcaaagcaatacggtgcgcatcacagcacagcacagggcaagggaccgcagaggcgcaaaccgtttgcttctaactaccgcggggccaacgaacttttcctctccttcccgcatcctctccacctctcgtcctccccctcccctccgctcatcgtgccctgctccgctgagcacgccgcagctccggatctgtggagccggggatcaggcaggcggaagcgaggtcgtgtcttggcacttctgtggctggttctttcgtagctctagagaattttggtggatagagcgcctcgatcggagaattcgggggggacgagatggatggtctgcctgcggagctgtgcatcaagatcttccacctcctggatcaccaatctctcgcctctgctccccaaggtgccctttttttgtctgctctttttactgccttgtttctcacgattcttagtgcatcattcttgccactgtcgcattcagacgtaagcgctagcaaattgcatcatggtgcctcttcttatcttatgctaatggttcgcagtttaacttaaatcatggccttaacaagtgctgttgcaaaattcagtgtgcaggaagtggaacacgttgacctccgacgacgagctgtggcgcaggctgttcaaggacaggtggggagcggatgctgcagcgttctacgcgccagagggctccaggtcatggaaggacgtcttcattgtgcaggatcgatgcgaccgatatgggctgtaagttgccatcgaattcactcgcctatcatcccgctcgagctgtacttcttatcttggcatgcctactgtcacggtgtcccctgatattcagacgtggcacacattctgtagtacactgcaacaatgtcactctgaagtactcctatatgaactctgaatactgtaagttacgcctcattgatctttccaggggtgtcaggattatcagagaaggaagcgattactacctgatttaccagggtgagatccagaggtacttggggtcgagacagcatgtgagctgcgatagcaaggacgctcctgcgcagagtagcgaggacgagcagcggcagatatccgatcggatcttgttcttccttggagacctggaggctgcatgcgcagatgccaaacgtgtgaaggtgcgacgaccgtgatatccaggaacagcgctgtatgacattgtagttgttatttttgcacatatttcgtgcacatatgttgtatgtaaaatcttcaatccattatccgtagcgtttcacattcatcttatgtatttcctcattttaaaagtaaaaagtttgtaaatctgcgctaatcgccttttacttttaggcttttagcaaagcacgtgtagcatcatctggtaatttttccgccgtaagtaaatgtaatagtcatttagctgcaaatgcatatatgcttaccacgacaaatggatatgtcccatcatcttttctaatctttataaaatgtaatcataaactcgtcgttcgagattaaaaaggcaactggcctctcctgtcagctaaggatgttttacgcaaggaacatgagtactcaaatgtcaattacgagtcaataataacatgaagttcaactggttaactgtgttactgcagctcatgggtgacagtgcgttactgattgaagcctccgtcgaacgttgagtcaacacttgatagcagctcttgccatttccaacgctccctcatacgtcttattgccgccaatgaagccgctcatatgaacaaagacacatcctggaatgccaatatcgtttgacagttcatcatctctcaagcccctccacttttccggcagaggctttcggctctcaaatctatccggagcaacgccaacagcttgtactctccaacttttgctcctctcatcctgcaattacgttatccaaatcagcatacgcagacatcaatacttttagcatgctactggccaacgctagaaagagagtttattctatgatcagaagttcagaactacaattttaagtgcataaacaagggcccttttccttctttcttagattgaataaaacggtgtttgacgagagtaagacaaaacaaggtggaaatcagcaagaccaccctaagggttaatgacaaaatggaggaaacatggcatagtataaatgattgcacttaaagtaaaatttactttcaaggctgtgaaacgtaaatccaaaagaaaactgagtctctgctagagcttcaagctacatgctacttctcgatttcagcttatgcaactagaactacatcaagatattcatatcataggctgagaaaggcaacacttctcacctggtacaacacatacttcgtgaggggatcaatcttcagctcctcttcaagctcaaacagatgaagtttccactgcaatgataataagagattctcaaattacatgcttggaatgattcaatatgttagtcaattcagcagggtattcctgaaaaaagatcttactgggcagaatctatccaaaaccataatttcttcacttggatcaacctttcctcttgacaacaaacactccaagacaatagatctcgcaggtaaccatgacttaacatgaaagcgaacactctggaagtgaaggtgcaaaatattatcatatacaaagagatgaatggcgacacactaaaaacaaagttctcatgcagtaaactaacgtatcacatacagagactattatacctccataaattcacttccagcaagcatcattgcctgttgaaatgcagcattttccttctcaggtgactggtctggatcggtccagtctggattaagacgcccaacgcgtgaagacaagtgtgtgttgttcacatactttgggggttggtctgtgtcatattgattgattccgttgtcgactgcatcaagcgcctgtcacatgacaaaagttattgtttctctgggatcatgcagaaatattggggtagatgcataaacacataaattaataacagtgtataaaagatgtcttaagaaaaaatgatgtgaattgatgctttatagattgaagctttctactccttagtataacggttaaacttaaacaaaaaaaattacttgcattcaagtatatctgatgcctctacacccttctctgctaactttataattggcaccaaacgcagactggatagtaatcatattttgccacatacagtgcatgcagcctatcaagctaattcaaaagtagatcgtgaaaagcccatcaaggtaatgcaaaagtacggatgaaacattgaagcattaaccttgtagtaggcagtcgctaagctatgatatttgttagttggttccatgctcctaagataaaacaaaggatctaatatgtgcctagcaaatatttcttgctgtatgtctgctagtggatgtataatggagctgcaatttatcaactattctattccccttaagggcttgttcggataatcccaccaattaacccacgaacaaggggattgagggggattggagggaaataattccacaccccctcaatcccctccaatccctccttctccttccttgttcgtttacttctccttccttgttcatttaatctccatgaaagaaggattggagtgtttaatctccatgaaggagggattagaggggattgaggggaataattccacaactcctccaatcccccctcaatccccttgttggtggcattaaccgaacaagccatcatggggattaaacgaacaaggcctaaagggtgctcactactgctattcaaataatgccgatgcacagatttatatcaccaagacattaacacagtaagcatactcaagtactcaatggtgatatctggcacgtcaacacttcttaggtcaaaaaaagacagagtgatgcagacgtccaaataaatcaggcgatttcagtgtatagttatagactgaacacaacaaagcacacccacaaggcaaacatttacctaaattccagccaacctttgattctctccaaaaaaagagttggcaaaagtggcaaaacaaacagaaatggaagtttaaaagaagagatcttactcaagattcaacataatcatttagtgtatcaaaagcacgacagtaaacattcaaaggttgattatctgtgcagcttcatacctcaacaaagcttttatatattgcaagatacaaccgatgaacatcttcatggtcttcactaacttcaagctcctttgcaattatctccttaccaaagtgctgtaacatcaagtcaagaatcagtggtaaacatctgaactatagtcatggtcctcaaatggcaacttgtaaatttcaatggtctaatacatcatgctggacaaccaaggaggaacttggtgtcaaataattaagaagaatccatgagcacatcaaggatcgaacgcaggaggatcacaaaaggactgcaatataccacactagcaagtgcatctcggtctaatacatcacaaaaggacatcatgatcttaaatccactaataaatggcccatcaatctgtctagcgtggtaatgcagttaaagcctcttatgtagcagtttcaaggttctacctaacaatgtagagaactttgttcatcgtcgtgtttgctaacaagttgtcaggaaaaaagctcaggtttcagaatgtgaattatccatgggaagtaccttgtaaacaagcccggcactgctaagttttgtgttaaagccatgtccaaagacctcattaaagcccttctggtgatgatcgtagcgatgccggctgggatcatagacaccaccaacatcaagcacagcatccagagtatcgaggatctacaatgatgcccaacaagaaaaagggaaatacaggtaagttaaagatctaagaatctaagagcacattacaccaaatgagaaggtttatgattattgtatcatatacaactacaagcagcgatttttacataaattacacaacaatctgtactgtactaattgttgcacagacgctagtacaatgggaatcattctgtcatggataagagtaaaatcatcagcacctaactaagacacacatctagcacagatgcaagcgggacatttaactatttgctacttttaagatgtggtgtgtaacaatttgccactcataatctatgatatatgggccatcatgtgtctatgacatgtgtgtccagtggcaaattgttaaatgccacatctaaaagcagcatgtacaattcaggacaccagattatacgtaattaggagaaaaacacaactcagttaagtttaacagagagttgcattattagtatatacagaatctaattgaaacacaacatgtctacaaattgtaggaactgccgcgtacagacccgcaacgcaacccctagagacagacaaacttcacagaaccaaagtcattttacaaccccccccccccccaaccaccccccacccaaaaaaaacagaaaaaaaacaaaaaaaaaaccaaaaaaatgtaaggcaatggtaggttaatcgagccagtgagaaggcaagagacctgggggtcgcgggtgcggacgacgtcggcgccggcgaactgggaggtgaggcggatgaggtagcacccgagcgcctcgtcgcagtggaagctgccgttgtgggtccccacgcgcttgccgctccccgcgccgttcgcggagcggccgtcgcccgagacggacgagtagaccctcaagcgcttgggcgaggcggcggcggccatggggagagggtttagggtttgggatcgcacgcggggaatgaacgtgacggctcgctgcgacagcctccaggcggcgagcatactacaagtcgcgtgcggtgcgggcgatgggggatgaggtggtgactttcgctagatgttgggtttttgaggtggggtttggttggccgttcaaggccgccgaactgcaggaacaaggcccgatgcttgcgtgagaggtttgagttgttgccttgttgggctccctcttcgcatccaagggccgggacgggatttgtccccaacttacgggcatataaatatgtatggttggccggccatataaatgatcacttccaataaataatttgttctctttctaagtcatgtaaaatgagtgtatgttcgtgtcttttgtccataaatactcttactttgagttagattaaacgtgtatgtttaagttgggaaattggaggcaaacaaaatagatatagaaatcaattcccactcctttccatacaatggttaaaaactcctatcttattccgtccagcaaatggcgtacgtttagtcccatcacccctccggctgcttatcatcttccacttccaagatttcaaacaaaaaaatttccatccgggctaggataccacatgggcgattgacacatctgccaccttctcccgtcgaatcaagagccctttagtcccatcacccctccagctgctcatcatcttccactttcaagatttcaaaccaaaaagttctccatccgagccgggagactagctggtcaagggccgggagaccagctgggcgcttcaattgcagtgagaaggagagccatccccatccatccctctgcgcgcggattcccatccatccatctgctcgtgcggatctagaatttccgagaggaagaggcatggtgagtttgcaggccgccgagcggcgtgcggtcccgttcgtggtcttcacgccactcgccaagcccctgactgccgcgctgagcagcaagaggggtgatgggatctcagatgaacttattgcatgcatatatcatatgaccaccactttttacactttttagactgcaccttcgtaatgcatgattatgtatggttggctggccggccacatgaatgatcaataattcattttcttttcaagtcatgcaaaatgcgtgtgtgttcgtgtctttttcataaatactcatattttgagttagattaaacgtgcattaagatattagaggtaaacaaaatagaaatcaattcacatcactttccatcaacacgttgcggggttgtatgagggattggaggcaaacaaaataagtataaaatcaattaattcccatgtttaagttgagtgattggaggcaaacaaaataccacagttttctataggatggttagacacaaccttggcattaaactcgttgcggttgccatagttaaattaaggaaaaagcgtggacatatactctagccgcaatagccgtctatttttaaaaaaaaaaaattatggaagaagtgtgaacatatactctggcgagagcaaaacattttctacaactcttgactaattttgtataatctgcaaaaatgttgtagtttttttttctctaattggtatagtttgccagtgtacacatattttcatcttagaattacttatgtaaactttttaacttaaatcatatgaaacatttatcttaaactacaaaatgaaacatttatcttaaactacaaaaatacaactaagagatttagtttgagtgtttgagggaaggaaaaagaactcatatttagaaaatacacaaaacgaaacgagatgagttattagtgtatgattaattaaacattaattatttttaaacttaaaattttggttaatttgtgttttctaacattttttttaaaaaaatacatcgtttaatagtttgggaagcgtgcgtgcgaagaagaagaaaaatcttctctctttatcaatttatcaaacgcagtatatgttgggaaagcaacggcattaaatagcaattccggatgaacgtatggagcacacaattttgcgagcaaagagccaacgtatttcataatcatctataacggtctataaggaataagtccacttcatatcccccatctttccatcgagtttaactcgtatccttaaaccgcaatactggaatcttaaccctcaaacttacaaagtcaggttaaattagatcatatggtagtatgtgtggccggttttgccgacataataacatcttaataagaaaaagaaaactgaaaataccattaggcccatatgtaagtggttaccttacattcttcctgtgattctcctctcatcttttctcttcccctcctctcctccatgtcggggagcttctcctgtcggtggtgagctttgcgacggtcagggtacttatcctggtggttgcggagggtgccgggtgtgaggtgtctagagaaagaaggagatcgtcatcgtgggtgccggcgtggcgggcctggacacggcggtcgccctgcaccgcctcggcgtggacgtgaccgtgctagagcaggcgcctgcgcccagattacggtcaaacccgttcagagcagtctgtccccaaaatcaagctaatcatggcagccacccacacaaacgccatcctctccacttcccctctcagagcaaggataataacatagccaactgctagctctatactaataccatgtcatttatggcaatcactaatataataggttggctgttaggttagctgtttgtttacatctattgaagatttagatatttaatattaaacatttagatatttaatattcgcatgtgcacctgatctcctcgtatctggttggaagaaagcattttttcctttgtgtgttgcgcttcagccgagtgatagatgaaatgcccgctccatctttttcttcccttctcactcctccacgtcggattttgctgacgggtaacatgctagcgccggctgattaggatctattaaacctgctctcaagtgctgccgcctcccgagtcccgaggtgttccacgtcgccgtcctgctcgtgtttgatctgctgacgacggtcgcgtcccatgtggtttcttctccggattcaatcgtgtccaggagtctaatttggtatttctctcttggtggttttcaattctcctgatacattcaatctatgtgttaggtgcagtagttatctcgttgattgctcaatgtttttctccctatcgtcctagcaattagcagattgatcttggttcctataattcgtcgcttggaggagaggagaagaaaagagaggagaggggaagcagaggaggaaggtgagaggaaaccacttatatgtgggcctcactattttaaaccgaccacacatactgctataagagtattatacctaatttaacccggttttgtaagcttggggttaagatttccgatattgcgctttaaactcgacgggaagatgagcgacgtaaagtagacttattttggtctatattttcacgggcccaagcatcccaggaagtgcctccttgtaaatgggcctggacctgttgaaaagacaagcgggccacgtggactggtacatgtaccttgtgcggccgtttccgagttgaaacaatgtccgccgctacaaccgggttcacttttttatttttcattcgaacgtgcacatcacggagatttgtctattgctccgatattgccgaccatgcaaaagcacaaactaacatgatgaatgatgggtgacccagcgtgaccgaccgctgtgatctcggttgctactaccatccaggctccagcacaccaccttcttttctttagggcccgtttgatacaactacaactctagcttcacctctcctagagttgaagctcatccaaacagtttcagctccaccaaaattaggagtggagctgggtagagctctctcacaaaatgaactactccagacccaactcctagagctaaatttaggagttggagctgtatcaaacaggcccgtagtagagtagctgtagctccggagcagctagtgcgctaccgcgctagctccaatcaccggcctaattaagtgccctcgtcatcaagtttctagtagcatgttcttggcaggtttcacgtcaagtttcgtcctttgtcgtttgatttgtgcttgacgacgttccaagatcacggaaacatcaaacatgcaggcagaggtagttcccatggtcactacgcggcgcctttgattgttttctgatgcctactactaccttgaaaaagcgacgaatttacgtgaactactccgtatatataccgattttacttgaaggttgaagcacgcatcgtagcgtaccgcgtacgttctctcgcatacataaaaaactgtactatttgctcgcgatgcacgtactaagttatgtgaattaaattaaagaggtatacacatggtcagaattaactgtgccgtccagccagacgcatcggtactacagcagcaacggacgggtcaatttctggggacgtatgctcggccacctgtcgagcgccatcaaatggcaccaggacaatgcaacaatcgcatcaccggttaattaagctgttcagcacggtacagattgcaacatttcatactccacaagcatagaaaagcaaccagttaacaggacaatcacgagtatcactttaattaaccttgaaaattaaactatagctagaccaacatgcttttcaacgatctgtttaccaacctggggagatttttattatctctaaattcctctcctatctttacacacgggattgatacagcatcaaacacactaacacgccaccaaacaatccaaagggtttaacaaaaacacaaacccgtttttacgtaaaaaagcgactatatttggtggggttttatgaaagaaaaaggtgagagatcttataggcaaatttagcttctacattggcggcgacatcatagggctaggatggacccggcccggacgctgttgccccgctcctgtgggccctccacctccctgcgtgaggagggggccccacgtgtcagcttcccggcgcggcgggctttctccgtcctctccgccgccgcgtccgcctccatctgctcccgcctgcactcctcgctgcagaacggcgtgtcccctctgctcgatcggcacacgaccgcgtgagatgagatcccatggcgtttggcgaagaagaagaagaaacggagagggtgaaaagtagaggggagagatagagtgggcggcacctgtacatgaagatgtcgcggttgccggcgagccgcttccggcagaggaagcacgcgtcaaggaaatgcgtgtgccctcccctccccatctcctcgatcgatcggatcgccgcgcgcagccacaccacaccagcttctccgccgccgccgccgcgcgtcgacctgactactccggcgcgagatccggtggtgccgtagaataggccgtgcggccggctgactcctccggcgagatccggtgcggattcccctcgcttgcggcggaatcgcccgtggtttccctggattctctgatgcgtttctgcgtgttctcagcgtccaaaattcgtgatgcttggtggggaggcaagcgaaggatgcgcgggctattatatagtgggaggggtagagaggtgtcagtaagtgggaccggagtggagatcctgcgggtcccacctgtctgtgggctctggcaggattccgcgtggagaccgacgcgctggtgttgtggcacgggaggtgggccccacggtcgccgacccgctcgtccatctgccgccttccagcttgccccggcagtgctgtggagtgggccctctccggttggtggaaccaacaagtcagtggtagtaggagtagctaggaatggggtttcaggctttgcttctggatgaatcttctgacgatcaccgccggatcaaaacagccttgcagttcagtctaaacaaaataaagaatgcccgctccttgcagcacatgtacacaataaacacggagattttatataaactacagtttctctatttatttttcatgattcttaacaggatcggcaattattaagcccctgtcagatactcagatcttcaagatcttgcggccctggcagctctggaaaaatcttgagaaagtcacacggtacctttggttctttgaacaagaagaagaagggctgtagtttcgccggcgaccagtggtccgcaagtttcagcctggagaggcatgcatgatgcacgggtgtttagcccctctctctcaaacaccccccctattagttgggctactcacatcaacgacctggagcactgcaaggcctgcctcgtggcctggatcctccatgaaatgctgacagaagagctgagtcgtctcgtcccgtaatactggaccagtggaccatcgcatggcgggcgtttcttctgcagaaatcttctgaactttagaattaaggttgccatttctatcttacgggctcgcttattaattaagcgcacgtagtaccggttgcggtgtggctgacgccttacggcgggcaacaactgcacaagccgtttaacttcatcccaaaggaatccatcaagtgtggttggtcatcaggctgagtttgcagtttacaggtggcagtcaaaagaaagcgtaagagcacaaagattgactccgaatattggctgcccttatggattccgtcaaagttcgagccatgcctcagcgcattttcgttacggtaagtcggtaattaacatggttaattagtagcttctcacttgggaaactccttttatcccttaacagaatacctcctcgtttttatatattatttaaataatcataaaaaaatttaacatgataatcaatataacatatactcccaagtaaataagcaaattcacatttaacagtcgcaagtaaaaaaacaaatttcagcacgactagcgtgtcctactcgcactaaaatttattatttttttatttgtacaagatacatttgaatttgtatgttagtggagtaatatatcatatattgatctatcttgttaaaaattttaaaattttttgatgatttttcggatgacatgcataaaacgaaattatatccttgagaggtataaaagagtgatattgtggagagtaaaaatctaattacatcgcacttacttacatgttagagtcgagcaatgacatcttagctaaaagagtgatcttgtggagacgtgtgtgtcttagagcaggtacaatagcaggctattagccaactataaacatattttaatgagataaatgatgagagagaagagcagcgggctacagatctgtagccataagtaactattgtatgaattggctattagattagctatagatgaattggagctagtagtgggctgtactattagacttgctcttaggaaaccttggggagtcttggcttaaaaaataagctgatgtggagctatcacctaggaagttgcattatgtgagttgtgtcgttgttgtggtgtggttatttttggcgtctttgatgattatatatacactctcgagaaaccacgccacgagaccacttaacattggttttcccttccctctttcagcgcatgctgccaaaacgatgtcgggtgtaaagttgtgatgcctactgccaataggatgcttgtgtaaactaatttgctcatcatctaatatattcacacacaaccattttgcgtgctcgaaaaaaataccactttacaatgtaaatgcccttatgaaaggataaattaaaccgaacggtttgattccacaatccaaaactcttctaaaacacgaatattagggaaaaacctaatatcaaataattagaaggggcaaagtttcgaacccagatcggttaacccaccacattgtggagctagccggaagacccttggacgtctctcaaatccaaagctcttctctgttcgctttggataagttccgttatttttagcttaattatatctccatattatcatcaacctgattatatattcatgccaaacttataataataggatttattgaaaacaaattcttcaacattacttagataacttttttacaagctaattgttagttacaatacataacatctaatttatacctataaacaagtatttatatcaccaaccaacttttatccgcatttcaacttaaaaagagcatgccttaagacatgtaacaggttccaaaggtaatataaatatgcttagttgggtactattgtgcaactagacagccaacagatcgaacatcaacaaaggaaaatgaagacgagatggaatagagagggcgttacaatatacattagaaaagagctcataggcttcttttgacagcccggtctgaaccagtacgaagtaaatagaccaaacacgagagcaggacgcctggacgagcatgctgttctaaccaaacctgtatatatatatatgctcatcagcaagcataatgcacaaaaaaaactcttctataattacttcaccgttttccctaccacaaacgtgggaactcggggtcgtggtggtggttcctctcgatcgatccatggactcttcgaaatgtctagtacacacctgtacttgtatatgtagtatcaccccagttgaacgcgtgtgtgcatgcatgcgtaacatgcatgcgcgcgtgagtctccaatccggcaaagggcgcgcggcttggtgtggtgccgagctgagctctctcttgatctctacctctgcggctgcagctgacgctggggcgcgcgctctgatcggtggtggtgcgccgccgcctgcgccgtgggagagtactgctgcttcttcctgcggtgcctgttcctgtccatctcgatctgctccctcctgcactcctcgctgcagaacggcgtgtcccctctggcgaacgaacgacatggtttagctcgatttcatggtgtgtgtgcagccaggcggtggtatggttgagggatcatcacctgtacatgaagatgtcgccggcgaggcccttgcgacacagggtgcactcgtcgaggaagtggtgcgcctcctccacctccgcgtcctggacgcagaacacggacggggcgccctgcctcgccgcgccgcccctgccaacgttcaccgccttcgcgccgccgctgctgctggtggtggtgcccggccggatggcctgcgcgctgccgccgccggagaagaccgcggcgaagtcggggttgccgaaggcgtggaagtaggacgaggtgaagtccatcgatcgggtcgtcgatcggcgccgccgcgcgcacgtctcgccgcggcacacctacgcagtccggcctgccggatccggatcaggcaggcgagcgagcgaccgagcgacgacggcgatcgacctcggactctcggaggaggggcagaggtcgggcggaggtgagaggccgttgggaggcaggcttaatacttgcagggcaaagagcttaactggctaactgttttaccagctaatctctagcttaattttcttcgtctccaggggaaccactcgataaatgcgtgatgtctaatttggaaaagggaaaatggttacaaaacacagcaaaaaggtgacctgtgttgattccgttgcatgcatgcacctaaagataggttatcactaccgtgtggcacctatttttactgcatccatgaccctggtgacctggccaattaattcgccagagacgacgcatgagtaattgtctgcttgacaggcagcatttctacgatgtatattactccgtacgagattgcatcacgatttggccggtcgatcgccatgcaagtcgaggctacggccaatggaagttcgacatcacaaccattcgtgattccaaggtaccttacagatactctaggattaattaaatagacattcccgtcacgtcgacaagcgctccaagacaacacacaaaattgcccttcatttgtttcgttgtgacgaggttcatgataagctggaagcacgcaaaaacatttttatacggccatgatggcgagcgaggacaggaaaacggtggaatttctctgctgccgcgcgctaaaaaccaattgagccgcgcacctgatggtttcgtgcacgcagcttcctgaaatcaacgtacaacaactacgcagtgccctttcgttctacaggaggtatatatgcatgcgatgctcaccgtgtacacctgaaggctctcacatggtttggcacttcggttttgagtttggacgtggactgcgttgtcgcgagctagcagaggggacagcggccgtaacatggccagccagcacagcacagcacagcactgcactgcaccgcacagcagctagcgcaccacggcgatcgagttggtgccaaccgtgtgcgacgcgacacgtacgtgcgaacgcgcgcgtgctcgtgctgagctcggtctcggtctcgacggatcggtcgatctcacgtgtgcgccctgaacaaccagcagccgcagcctgcataccctgccttgcctttgcgcccaagtgggttcgtgctgggcttcaggcacaggggcgcgggcaataatttggcgtgcttagatgtcgtaacgtgtcaagaatctcagctcgcacgggaagagggctatcaagtgcacccttgcgttattgaatttggcctaggttgcctaaaaacgattcttttctctcttggagcgtgcactgtgagcacatgcatggttgcaacttgcatataccaaggcccagcaatgaaagattatctctctattatatactaaaagtccataaaacttcctacaaacattctcaagccgccacgtgggagtcctataaacaatcttaaaacgtcacgtgtcactttaataaacaactggacccactatttttaattagtattagaaaattgttttttcacctccctctcctatccccacgggctcacatccaagcagcccccgcacgtccatacgaacgtacaaacgtacgtaacgaaactacctacacactactcattggaaaaacaaataaaaaactattcattgaaaaaaaaaatgaaaaagaacatatatatgtatgcacatctgcacccacgcgcggttggaaaaggagcgatcaatccttacccctttattttcttcggttgttcactatctaaaattttataaaatatgtgatgtatcttatctataaaaaatattgcatccatattacctatatattttaattacaaaaagttatcatgtggacatatagtcttaataactatatatgtgtgttttaataactgacaactaagtaatctcctaagccgccaagtacattgttgaccaattaaatatggttgatcaattattttatactattcatttatcttagcaataaattatttatgtatgtgcatacgtattgtttttattttagataccttgatgatcataattataggccattaaacttcctataaatgcttctagacttctagcccgttacgtggcaccctataaacactttcgagttggcatgtggcactttaataaaatagagaaattcgaccgtcgattttcatttaactcaatgaacccattattttaaatcgttagatctatcataagaaaaatgtccctctgttcatgactctgcgcagcattctcacgcatctacctaacctaccctgcctccgttcctctcttttttttttctatttccatgataactaaaattattattatttttctttatgggcctaaaaatatccatcaatagacatcaaactactagatctagcaagctcttcctctatactctctttataacacagtaaacatcatacaaatatttctaaataactacatggcactcttaaattagagaaaatccaaaaaatatttaaccatcgatttctacttaaatcgattttaggttgttagatctatcttttttaaaagaatgatcaaatgtaccaaggtcgcaccaacatatatgaccaattatttcattaattacagaaaaaagtttaatgtgataaagttatatctacagtgcaaaattgttctacagtacattgtcattgttattgtaaatttaatagagaggagataatatagttgcacaaacacacggctttatataaaagtccattaaacttcttgcaaacacttctaatccatcacgtggcatcctatatatactcctaagccatcatatgacgctctaataaattaaaaaatcatataaattttgataaaaggaaacacatctcatcattgattttcacttgaattgttgatatgttattttaggctattggatttatctcatcaaaagagaacaacaggacctccaccgttaggttagattgatctaattaaccagagcctcaaaattaaagaaaaaaaattctatgatgcacctcctgcggttgcaggagatcgccatcaccgtgtcaagtttctctgatgagctacaactttatatcgtatacaacacaacttcaactttataaacatggatccgtcccattcatattttcatgtgctaaattgttcacctagacaaaccaacaattgatatatactggagcatagtcgtaaaacatgccatagacatataataccacatataagcaacaaacaactaggggtgaattagttttccggcaagttcaagtaaaaccgaatttacgtgtggcgcgatgcatacaaacagaggtttaattaggaggtaaaaatatgtagtataaaccacatatattgcaaacctaaaaactatcacatgatataaaaataaaagtttgagatttatccacatcatcatgagtaaaacttttatttccaatatacctccacaaatgcttgtaggtcatcttacagcaatgcacataataaactaccatgattgtttaaattcctaagtctttccaacaaagaagataaaatagggtagatattgtgggcttcgcattgaatattatgcacaagttgcgtgaacacaccgtgtaaaccaactgacacacacacacacacacacatattatattgggagtaagaaaaagacatttatactcttaagaccgtcagaatttttgttacggataaaatataatgaatttaagggtaacactttacacataagtgtaataaaaaatgcctaatgtacattagctaaaaaaagttataaagagtgattgtctggagtatataaattcctaatgtttaattataaattttagagtaaaaatatttaaatcatgacgacactgatgaaaagtcgacactgcaataataatcacatatgcggagttatttttagctatgaaataatattcgtaggctatgtgaaatctcaggcactcttccccttaattttttttctcccctaaaagaataatctcacgcactctacacaaaacaatgagttgtttcccacaatccaaaatcaatttggactacaatagacttttttgtttggaatatatatatatatattcatatacactaaggcacccattaaaaatgcagcatatagaaaaaaaataccaggtgcatcttagcaacgagatacaataataagttgtaaaatatctagcaaattttactacataccagaaagacctatcaagttctatcaattgttggcaaacaataatatgggcacaagtaccattattttcacatagggattttcaactttttaattgtatgaatagttattttcatcacaactacgcaaatgatttttgtgagcattcttttcacatttggctcaaatgtgcagccttctatgtggtgagtctcttgcctcaaactcatgagtcatctttgaaaatattttttgcaatccttttacacaaaacaattttagtggagtgcttaaaccgcaatgtagcgttgaagcttttacacataaaactattttagtggagcgcttaacccgtaagatagtattgaatcgatctactccttttgttatagaaaaacatagctcattttacatcataatgatattttattctttcaaaatttttatatttctcgtcatacaagtcatatactcatattaaacacaccaagaggtgaagataatgataaatcaattcagtaaattctatcctatcctttaaagtacctccatgggtttctccacaatctgcatgtataagcgcctttaaggtggcaatacaaaatcaatagcctttcttataataatatgattaaaagttattttttttctaataaattattattttaagattcaggttgactaggtcttttcttcaaaataccgtagggtttcacatattaaaaagaagcgctatacaagatatgtatatttgatcaattaaaaagaggggatagcaggatggttaaaaaaaaacttacgagcaataaaagtttctcgagacttctcaaggaaaaagtaaacaataaaaattcaattaaaatgaaaaatgctttactttaatttcaacttattttgttagaactatttccaaaacaaaataatatacatgcccgcgcgaatgcgcgggctaccttgctagttggtagtaaagcatgatggtttgttttattaactaactccaaagtccgctttagcgcattacctttggcccttttgctctactaaaactaggcggtaaagaaaagaataatcttttgctatatgccaggattccaatgggttgcactccgtacaaatggaaccggaggatcgaatttgttcgatgttactgttcgtgatatatgacctggaaccatatatttttggatgaatgtagtactaatttttagagaagtataaacccatttacattcgtagaatcaaagacttcgtaggttgatgtctcctgaaatgcaggaacaatgaacagggttgttatatatttggttgctactatattttaggctaagatttggcatgccaattttttgttggccacaattttaacaagatctgacaaaaaattgtgcctatgacatatgaacaccaggtaaagttttttcaagccaaatgtgtaatagcaacctaacaatacagtaagctggtcaaacttccttatcaaagatatagcaaaatgtggctactactaaccaaacatccccggaagtgacaaatgtgccaattaagtagattacatgaactagctgctaaccaatatgttacgcggttatttgttatttatattttaaaataaaaaatatttatgttttaatgattttgaaattcgtaattaataacaatcgagttatactcggcctataattttagttgtaacagttctatatttgacaagtctagctaatatttagaataaataaaactagtagattgtattcatattggagtctcaattttcataacatgcatatatatgggtttttacgggatccatgatatttaatgcaaacctaccatgatctatataatcaagtactactagattttttttagttgatataagagtttttatggcgttcacgaaaaaaagtaagagtttttatgatgtgttcgattaatttaggtgtagtagatggatgtattatttggtatcagaataattttatagtggacatgaaggtgggggctacgggtatacggtcttcagtcgaagtgatactgtacgatctactgtatcctaattcttacaggtaactgaaaacttcttggcaacattagagcaccactgattacgttgatgagcacggtactgcagctcagttgcaaatgcaaattctttatgtcaaatactacaacttctcttatttcttccagatcaagaaaaaaaagagttaagcaaaggccgtatatatacagcacagcatacaaatgaatacctacaaacacataccagttgcacacacacgctgctgcagtgtgggcaacggaaaaacaaagcctgtagtaattcacaggcacacgagctagctagagctagcgctcgagccgatcttcaataatctccaggacggctgggtagacgcgcagggctgttcgccgccgtcgatcgagctgaacacctatggattatattacgtgtgtacagcaaacaagccgatgccggagacgacatatttttttagataatagaaatggattacatctccggcttctgtcatacacatagccatagccggagacgacacatgccgcgataatatttctaccgggcccagaccgggatgccgtgcgggctctgccgccgctgcggctgctgctctcccctcgcggcggcgggctgcatcttcgccctcttcttcatcatctccgacgcgtcgtcggcgtcgatctggcgctgcctgcactcctcgctgcagaacggggtgtcgcctctgcacgcgcgcacaaagcagaaaaccaccggtcacaaaccagaacgcgcgtgcggcaagctacaacgtacactacaaactccatgcggcgctcacctgtacatgaagatatccttgttcccggcaagcatccgcccgcaaaggaagcaggcgtcgaggtagtggtggtggcgcccgcggagctcgccggcgacgtcgacgtcgcgggacgtcgtgcgccgggggctcggcgacggtgagactgactcgaggttgccaacgggctccaactccaaggtggcggagaagtagaagtaatcctccatggctcggatcggtggcctcttcttaacttgctgctgcttcttaattggttgcaaggggggagacagagacagttgagatctctgggctgaagaggactgtggttatatagaggagaggagtgaccggagtttcagtttgcctcctctgagtctgttctcatctagttttgttagtgtgttctaaaattttggcggacgatgaattacggatgaaatcaattatttaatgacacagatgaaaaaattaaatactagaaaattgagagatatgtttaaaaataatctaaaaagtgctgaagatatatatttttttaaaaaggtgacattcaataggtcgagaagtgcacccacaataatccataacccctgttctgaatggcttatggacaacggattattgccggtatgttttctaagcttttaaacggtaagatcttctttttttttaaaaaaaatcatcagtttcttagtaaacgtttttaatcaacttatcaacttaattaatttacaatatatacagctcattagttttttcttttagataattgttataaactcggtttcattcaccatccatcagactatcactatttttgaaaaaacccttggactaacaatagattgctcttgtcgatcatctctccagcagtttttatatcattgatgctcttcttagctgaacttgttttaaatacatttgatccgtgaacgtgtatcattaccagagtgacgataaaattaaagatagtacagaagaatgataaaaagacaaattattaattacgtccgcggagactttgcattaacgtagaaatggtaaaaatcaatcctgaggtcatgcataacgcatagctgaacattttattatcatattaaaaacaaccacgttcgtatgcatgtggcgttactatgatcttcccttgccaaaagtgaaaattatattgctgcaggaaaacgacaagctaatcgtaaactcattgtcccaattgaagtctttgttaaaagcatggggagtaagatgtaagaatacatccatcctccaacgaaaggttggatcctccaaattaaagaaagcaagacagaaaaaaaattgtggttattaccaggttaggcatctagctggccaagtggcaacaaatctaaagctggctcctttgagtgctatgtggcgaatcaggtggccgagcaagagcaaaaccagggcgcagggtggcaattggcatggtcttctgatgatattataaggagcagctacacctcgtgggctcacgacccctatattctatgcgttcgcccctttccatttctcggcccctttactttgtagcacacggcccgtccaatttgatggatagaatagttttgtttctagaagtcatcacttgctcctggtttttgggtggttttgtgtgttgagcagtgcagcatgcttgcttggaacaccactaacatagttgaattagtatgcaaattacatgtttaacttttgttgcaagtgaaataaactaagatattttagtcaaacagataggtggtcagccatggcgtaattctgtattggaggtcaaaaaatcctacaccctccgtccaagttcatttctagcatctctcatttatctcaaaataagtttactttttataatcattgaatcagaatatataaaagtagaggataattatattaagagaaaattcatgaaatgccattgacaaacactctaattccagaaatgccattgacaagcgcaacttcctcaaaatgccatcgtacaagcgcttttctccccgaaatgccatcacaaccatagtgctgttaactcctatccgttaagttgtatgaaaagacaatcttacccttgggcaacctttttgctaaaacaacatcattttgtattgtttgctcacagaacattattttgaattgatgcatatttaaattcacagacgtgtattattttgctaccaatcaaattatttcaaaattaaattcacaaattttggcatcaaaattatttcagaaattttgctatcaattatcagggttgtgatatgagcaaaaataggggcatcaattatcagggcaatacacacagaaagtaccaatcatgatcaacatgaattttcacaaaataaagggttcacagtacttagcatcacaacccaatataaagagtacttagcatcacaacccaatataaatggttcacagtacttagcatcacaacccaatacaagagtactttgcatgcttaatacatcttagttcagacaatacatgtgacagtaagaaactcaatcaattattctcctcttgcttctagtccccattgctggactactcttcttgcttctagttctcattgctagactgtcatgtggtacttcattattcttcctccttttggcaggtagagtagtaggttgtactgttggggatggttttctcttgattttcttgtctttgtcctccttcttccccttccccttccccttctccttccccttccccttggcaacaggtgcagcaacatgttgtagtggcacaatggtcatagagctgaaaaaaaaagttatttagcaatcgatttaagttggcattaatcaagtgcaatgggtacagtaaaaaacaaaaatggctaccttggtaaggatggcaaaggctcattattagactcaagtccagaatcactaattgtcccaccaacggcactttaaaatcatatattacacattagttaagttgctgcagcctaggagcaataaaaggttaacaaagtggaaagtggaagatagaaatttcaccttgataggctagccaagatttgacttgacatagcagtaggatcaatgttttcagtggcaacagtggcagcagaagtagattttggttttgatttccttttcagttttctacaagaaaatgaaaataagcgaagtttgttggcaaaggaaatcaacatgaagatatggatatagaaatcacctttgttttgccactaaagcataggcctctttggcttctggatctgcttctttgcaacttgtccatctatggccataatttttgtagataggacacttttgctgacatttggtacctgcttttctcttgcccttcttattcccctcaaccccacctttgtgccttaaagttttgggcctccctgcagaactcttcaatattggaggataaagaaagaaatcacgtgtattctttggccaatgggaaatgtcagttagagctggaatgcgggctgcatatgtggctttaaatctggccacactatagcattcatcaacataatcatgcacctgcacccccctaatagatgtgatgaagcacaaggcatgagcacaagctttccagacacttgccactctctacatgtacatgtcttctcttcaagatcaactacatgcctcttaccaccttttgtgaaaatgcaataataagattatgtccatcaacattaataatgggaattgcaagtataaaaattcaatacgacatacaacataacattacctgggtctttatcagtaacctcggcaatgaaatcatcacttctatctaggtcaaagtttagtcctctacttttctcaagaagctccttcatgacacaaggtagaatgatattaccttccaatttggctaccaccttcttcctcacacgaaatttatccatcaccttttttctaatcttatcaaccaattcgtatggcataagacctttatgctttctgatccaattgttgaagcactccgctaaattgttggtgatgtaatcaaccttagagtgcgtggagaactcgcttcgcatccataacctacaaaataagcaaagacaaaatattacattcaacttcagttcacgtactgaaaaaacaagtattcgactaaaaaaagataccttttgtggtgggttttcaagtatgctatagcttcaggctttacttcacctattgaagccatgtgttcatcgaagtctataggagtccatgcatatgctgctggccataaatgttcctcaaaaactttgccatggaacttgagcttgaaattggacacaaggtgtcgcatgcattccctatgctctgcataaccaaatacctctttaatagcatagtcaatgccttttcatgcatctgaacaaattgatagtctagctggttcaccaatagcttcatgcagtttctccatgaaccaaagccatgtctcactagtctccgagtcaataataccataggccactgggtacagccaattgtgtccatcaatagcacatgcagttgctagctgacctctatactttcctgtcaagtgtgtactgtcaattgctaagtatggcctacaacctcctaaaaaaccttgaatgcaagggtgtagtgccacaaatagccttgtgaatctcttcttgtccttgaatgtcatatggtcaatggcgactatacttcctggggacctcttctcgatctccgccttccaaccatatagcttgtcaaagctactatcccagtcaccatacaatttactcatagctaattccctcccagaatgtactctcttgtaggggatggttaacttatgtgtgtcctttatcctcctttgcaattccatggccccaacactagcatcctcacgtagccaccccataaccttatcacaaacccacgctctctttgcattcctgaccttctcgctttttctagtactaagacaaccatggtacatctcatggaccttaatctgaaaaagaaaaaatatgcaattagataagaaaataacaaaatatgcaatgtaacacattaatgtaacacatacctgcactgctggaccaccatgaatagttgacgcatgaagcctccatccacatccttctttgatacatctagctctgaatctactaggatcagttttttcaacaaaaaaactcgaattctttcttaatggaatattgagccacagccaatctaaactcacacattgaaggataaatagtctcaacagtcatgggtgggttttctttgtcatatgcaacttgtgggattactggatctgcctgagcatctcgtgcaatccactcttcatcatcactatcagtgatactcagatcatctcccccttctacctcaggcacattatcagtttcagcaatagagtcatcactctcagatgaagagtcatcactctccgatgaagagtcatcaataccaactgagtattgtttctcatcatctacacctacatgctcatagtgcggaatggattttctaggtatgcatcacttttggatgcctgactagtgctgccttcctgagtaaaaaatgcctgagaggggactgaaagtgatggagtgcaaggtacaatagcttgggacaaattaatttggtttcccagagtgattaccactttaccccttttagtatgatgaaagcactccaacattgctgtcaagtcctgatctttgcatattggaatgagttctttgctactagcatgaatataatgcaaacatacagtttcatttaaaccccatggatatttttcacaaatatcacccagaaaatctttgaagtttgttacgtctgcatcaataggccatttgaaagaaaaaccacccggaaattcaggcctacatgtcttacccattattctcacgtcaagtaaataagtagaagatgtgtccattctgttgatgaacacatcgtcgatgtgtgagaagaaaaatgtgaaaaatgtaactgctctgactccctaataaaagtatattactcatagggcataagatgaaagacatacccatccggaatccaagatgaatccatcccctcatgttcatgctctccttcactgtgctccaatccatctataattccaccacaatatctcattcacatcatgcagtacaaattcttcaaatgaaaccaaacaaaagaaggaaaatggaaccacctgagagggatgtgccacctgctgggactattatgccgctgctagtgaccaccgtaccggcgcatgcagcccccgcaccaccccctgtgccgccacttgccacctcctcgcctcccgtcgcctgagagcctgccaccgacgcgccgccacctggagccgccgtgccgccacctgggagcaccacatcgcagtcgagggccgccgcaccgccgactgggagccccgcgccgtcgctaggggccgccgcgccgtcgcctggagccgcgggccgccgcctgagggtcgcgcgccgccgcttggacccgccgcggtgacccgcgccgtcaccgggggctgtcacgccgtcgcctggagccgacgtgccgccgcctgggagccccgcgccgccgctgagggccgccgcgccgccgccgagggccgccgcgccgccgccgggggccgccgcgcctgagtgccgcgcgccgccgcccgggagcgccgcctcgctgccgccgccggggatccccgcgccgccgcccgcgagcgccgccgcgccgtcgcctgggggcgctgcatcgccgccgccgtcgccccccatcggttaggtttagggttccctctttttttccccaatctcttttcttttaccgcctgtagacagtataatttggagcgagggtaatctggtcattctggtaaaaataaaaattctaacggtgtggactaaacggtaagttgactatgatggcatttcagagagaaaaacgcttgtacgatggccttttgaggaagttgcgtttgtcaatagcatttctgggattagagtgcttgtcaatggcatttcatggattttctcttatattaagagtaaataaagtaagagatagttatattggtatttgataaactgatggtattatatttttttttacttttttattcatatgtgtggaatgggtgaaaaatgattctattctgagacgttgatgagactatgactgtatttgtggaattgtaaatgagatagtgattatttttttaagataatggaaatgcttaaatgggaaactgatacacttccgttttgccggctgcccatgcttttcccagcaaaaaagagtaacatcactttgctgcctattcctatcggtagttacatcctgcaagctcttttcgcttgccatctgtcgcttaattgctgaaaccatgtgccggcctctacagctacagcacctacacatagtttcagactccagatcaagcctgaaatgcagcgatcagtaagctaagggccctgctttaatcaagccttaagtacgtgtctttcaaagttttgcgagcttatgagaggcagacacatcgcacggttaggcgcgaaaacaacaggggcacaggacaccgatcgttccattccatcccttgcgaccaccacaaccatcaatggtagtacagcaatgctcctctttcccttttggcctcttaaactaaagaatttttctttcgtccgaatctttctttaactgctcttttttttcgtgtcacgaactcgggaaggcgtgcatattagcttcttgtaatttgcaagatgcaagtggttacgagacgtattagtaccttttgtcaaaagggaaagaaaacaagaaagaggttagtacatgagacgctacctttgggacactttaccatgcataggttgattgatagacaatgcatgctacgggtgtgtttagcttacgccaaaattgaaagtttggttaaaattggaacgatatgacggaaaagttaaaagtttatgtgtagaaaagttttgatgtaatggaaaagttaaaaaattgaagaaatattttggaactaaactcggcctacattgctacgaccgatctgaactgtactccctccgtcccaaaaaaaggcaaaccctgtgtttccgtgtccaattttaactgtccgtcttatatgaaatttttttataattcgcattttcattgttgttgaataataaaatatgattaatattttatacgtgacttgtctttttaattttttttataatttttttaaataagacggacggtcaaacgttggacacggaaactaggtttgtttttttttttttttacggaggggcgaagaatgtagcagctaacgtcctactacggtgctagtgtactggattgcatgtgtgcagttgatcgagggggtgaccggtcaagtcaatcgtccgaatgacgacgcggacaaaaggtgctggctgactgggtctagccacgcgcacaagctggattcgcttgatagttttcgcggaaggacgcttatgattttgctttgtgagagagaagcctctgctgctgcctttttgcatggttcggtttcagcggtcggagcgtgataactagccataggttacgccgtgtaaacagtgagcgacattgggctcaagaacgtcggaagcctcacgaacgtcttgggatggaagtacgcagatggctgtgctgtgtcatgtttgttttcggtcaccaaaaattacgcactgttaagctcaaattgcagtgctatgtgatagcctgataggtggtagtattagttttccccatcttttaaactgtactatagttctaaaaaaaactgtactataaaagatctctaattactcattatcaaacagtgcaataggtcatcatactaatcggtttgtagtactgccttaattcgtttgttcgttcgttaggaagccggcagcggccccgcctcaactgttcattttctttacatttctgcatttggggccaaggccaacggaccaacatcatgttgccggtcaggatggccaagatcattgcacaaaagcagctacaatgccttaccggttgatctgctcaggtgacaagttaatagtacagaatcgaggcacacattttacccagtaggatctacggctctcaaggatgaaagaactggttgcaacgacacagcatcaaagttctctcccacaggtcgaaaaggaagggaaaaatcctcacacaagaaaaaggggaaaacgccgtcatatacacgtattttctctaccgcgctatttctcttgctctaatacatgcacagaacaagactgcaagggtgatggacagaaaactggaattaactcggagcttgctgcttgccctgactcatctgaatattccttgtgcgttcatctcatctcgatcgggcgattccctttactttctcaaggggaccccggatgctttacttgcgcctatggcttagctcaggacgggcacattcgccgcgacggcgacactgccggcgtcgagcctgtggcgctgctcgtttcttgcagcgcgctccctcgcattcgtggcgctaaccctcactgctgcttcgtccatctccatctggtgatcccggcactcctcgctgcagaatggcgtgttccctctgtttgttcacaacaaaaagaaagctcagtcagaaactattcagaatcagagctcagagaagctgatcgcttggtgatcactttgtattctcctgcctaattatccaagtgattcaaccgataggagcaaaattgagcgtgaaacagacctgtacatgaagatgtcgcagttcctggtgagcggcttccggcagagggagcaggcgtccatggcgtggccggacaggcaggcctcgccgccgtcgagtggctcgatgtcaaagaacgaagaagaggacgacgacgctgacgccatctcggttacaacttacaactcgagctgaaagatccgaggagagaagaccgatgagctgagcaagtcttggggatcactgccaatacgggagagacttgaggctctcctcttttataaaagagaaagggggttagtggtggttgctgagtttggtgcagggggatgcgcgagaaaccacggctagatttccaggaatccgtggcaaacaaagcacggctcgcatcgccagcacacacgcgggacacggctaaactggccgaaccggcgcggctagggccaacacaagaagtgttgccccggtttttgtttgtttggttgctcgcgattagtctcccctggttgccttggagaccttggtggcgccggcgttgtgaactgcaatgctgcagaatccaccggaagatctgtaacaaacggggacccggtttctttatgcgcaaattcgattctatggggacctcttgttgtggccttttgctagctgtttggttttgtttattgcgccggtctcgccacgtgttgaggagtgcacatgactaggacacattaaattacaccttcaatgcggtattaaggacattaactgatgatagtttagtcacatttattatagtgtacaataatttcgaaacagagaggacatgtttctacgtgaagcatgttgctggctttatgtattttctcactcctttttggaggagaagttggcaatgaaaaagaggaggaaaggcaaggaaactaccggagcgaggagtgagtagtgaggctgtagcagcgatggcgacgcacgcgtctctagttctgtaccgcaccgtgtaaactttggaagcgtcaccggtgtggacacggacaatttacggtggatccaggaacaaattgcaggggatctagtagttaacatatgtatagttgcagtccgtgtttgattggttcttgacacggataggaattccccttgacccgtgttgaccacgttggacgtacgccagactgagacactgacgatgacaaacatttgtgtccgagccgacgaccccatggtcaagtaactaaagtttctgtcatgcatgtccttaacggacttcagggagagacagattcaattcgtctgcttcagttcagtacgccagaaaattcatagacgtgcagggcgcgttggcgtgtcgaatggtccacgactccacagtgggagtggatctacgatccaggaagcacattttccgtttcgtggttaatgcacattttctgttttgtagtttaatgacctggtctgaacatgcgtgatccactgatcccatactatagaattgcgcggtgcagcagttcagttcatcagaacggtgaccgggatggacaagggcatgcgtgccgaaatttcatttcatcaatatttcttcttgagttttgcttttgaaggagattgttcttgcttcttaaccatatatgtttttctcagagagaatcagaaatattgaattctaaatgctgtaattttttttacgtatgtatgtagatactccctccgttctaaaatataataacttttagccttcaggatttgtcccaaaatataccaccaacattctcttcccaaccaatcacaaccctccaccattaactttcccacctacctccactattcatccaatcacaactctacaccacccacttctacctaatttcttaacaaccgtatataattctaaactttttatattctgagacagagggagtaatagtttttagaatcaactagccaagcccaaaatgtttagaattcatactccgtttatgacgggctgggtatcttagcccgtgtaggcccatgaacgtcatgttgggctttgttagtttatgacgtttttttggggaataagttcactatgggtccctctatttgtcgtcaagtccgattttcgtcccttgaccacaaaatcggatatgacccgtcccccaacttacgaaaaccgggcaaacatggtccctcggcggttttgatagtggttttggctgatgtggcgcctacgtggctaatttgactcggtcttcatctgacttggcactgacgtggcgcttacgtggcaaatcgaatcgaaaaataataaagcccgtgggacccacatgtcattttcacacataaaatttttttaaaaaatagtgggactcacgtgggccccacatgtcatactcaccccctcatcttcttcctccctttccatctcccctctctccatatctctcccctcctctctctagcctccaggcgccacggctcactgggtcacgggaaggttcagcggtggtggccagcgacgcgacagcagccgccggcggcgagctccacctctcggcgcagccgcgcgcgtttctaaccatgcgtgcgcgcggctatctgatggcgtgggcggcacggatggattcatggatctaatcccgtgccagcacgtagcccccggcgacgcgacggcgagacgacgacggctggcgacgtcgctctcatgccggcaagagagagtacatcttcaactgccagcattaatttgcatcgagagagaaaattagcagtagcatcaaataatatcgtttcagtttcgtcgtaattaagctagctagccatgtgaggagtcagttccatgcctcgatcgatcgtcggcgtcgaagaggggtcaagaactcaagattaggcgatcgattccatctgactcatcggctgaatcatacgagctaccgtcaattaagtactcgtactaacgtacgcgtgtaaatgctattgactgcatgagagaactgtacaagtcctgtgcttacacaatgtactacggcctagccatgatctagatgatgcagcaaaagaccttttaattaattagtcgatcgacaagcgatccatgcatgcatgggagtaatttacaggcttcgagttcatacactgttgcattgtgacttgcgaaaaacacagtgctacactgagaattaatgatggtcatccgcagctaagtaatgatctgtgagcaattagcaattaccagttactgacaagaggtgagtaggtaaaggcattattagcaagaactgcatcggatcaaagttcattccggtggtcaaaactcaaaaccccagcgagctgaggcgtgagagcgacgtcgccggccgtcgccatctcgccgtcgcgtcgcgggggggttacgtgctggcgcgggattagatccatgaatccatccgtgccgcccacgccgtcagacagccacgcgcgcgcgggtcagaaacgtgcgcagctgcacggctgcgccgagaggtggagctcgccaccggcggcggctgtcgcatcgccggccgccaccgccggacctccccgtgacccagtgagccgtggcgcctggaagctggagagaggaggggagaaagatggagagaggggagatggaaacggaggaggaagaagatgagggaggtgagtatgacatgtggggcccacgtgggtcccactattttattattattttatgtgtgaaaatgacatgtgggtcccacggctttttaatttttccggatcaaattgccacgtaatcgtcacgtcagatgaagactaagtcaaattagccacgtatgcgacacgtcagccaaaatcactgtcaaaaccgccgagggacctcgtttgcccggttttcgtaagttgggggacgggtcgtatccggttttgcggtcaagggacgaaaatcgaactggccgacaaatagagggactcaaagtgaacttattcctttttttgggctgtttatgacgtcctaaaattacagcccaaaatgttcgcgggttcagatatgaaaagcgggagaaccgggccgtttcatacatgggctttccgggtcagcctttcgtatttctggataattttgcttttgctcaactgttcatctttttcctcgcaattcaagtatactatccaatattgccagattcccctctagaagttccacttcgtcagattaagatggaaacatgcacacttttttaaggtgaaaacatatgaccatctagtgctaaatcataccgataaaatacaacacgttattcggttattgctcttcatgttgcttcattagaacttatcttgagggtcaacgagcatgtcagctcttctgccccgagataattgattacttcgattggccagacgatgatgcgcgttgggttgacaaaacgcattggattcaaaatattatcggcgacctatcagctgtgcatgagctaaatgtggatacgcgaatccacaatcgttttaccgggagcacgcattcccttgcaagtttcaagtcacccgatgagactagccgatcatgcatggaacacgccgcatcaaaccatccatcaacaagatcagatcgatactggataggtcacacacggccgcgatacctatcaacctcgtgaagaatcagaccagactccaacctaaccatcccactaggagagaacgatggcgccccaaaattacaaggaagaaaagaaaaagaagagaacgatctgaacctgcaacagcgacccattcatccatcgcggcaacaacaccacccgtgaagaaaacggatcagatttcggggcggctgctacgagctatacgaccgattcgcggccggacttgcagccgccgctgccgtgcaaccaatccaatcctaagggggaggtgatgccactggcgtcgcacatgacgctaccggacggcgggttaatagccgggcgcggcatccatccatccatgcgaccatgcgtgaggcatggggtcagtctccgtcacgcacgccgcggaggcaggcggatcgcgttggtcattggtgacggcggtggtggtggtagcaggtagcgcgacgagaagtgcgtgccctcgctgcgatttcgctcatctcaaccacggctgttttaatggccctactaactgaacgctgctgcagtccaaaaggaccaacctttttatgaaggcacgcgtactcactggcagcatgcatggggatggggtgcgctactggtgtactgcttaccgacggtactagtagcgcgttggacggactaataacttatttcatcgggttaggctgcatatgcacgaatttgtgcatcatctacggcctggagccctggacgctagcaccttgtcactgcatccttcaattccctttgtaaagcttagcggtaaaaatttctcacagatcggaatcgctctacgccgttggtcgatctcttcgcagatacgtcaagatcgtaaggtagaagtaattaattactccgtcatagcagtggcagtactagtactactcccctactgcctactgtaatgacagtatcttgcatagtgctggtggtgcctgccgttgcgacgagtccgtcgaccatggcatgcatgaggggcaagggctcccctatacccacgtcccaacacccatccaccctggcaacgttcgtgccagcctgcggctgactgctcctccctgccacctcggcgaatccactccccaccaccagcgatgtcaagcagtcgcacgccccgcgattcggaagccgttcgctccgcgcgccggtggtgtgcgcgccagcaaccgacaaccgaaggcactgtgctgccgtgccgtcccgcgcccccgcaataacttcaccgctccgaggaagcgcgtcagttacctcgcgccaaggcattaacggcctccgcgcgggggtttgaggtttgagcaaatgcgggggaagggaaaccaaccacgtcgaaaccgcacggcagcacgggatggatgaccaccggggtagcatcacagcacggtgggtgtgatcggctgttaatatcaccaccaagtacagtaccccctataccatagtaccattggtaatatctacatcagttatgtcaatgggttgcaaagacgccaagacaggcacggtggaagcaaattaggagcgaccagttggggattatgagagccagaaaaaggaaaagaacgtgcagcttcagctttgcaaattgctccgtactactattaacaatgaacttatcaattgaattctcctaaaccccaaatataaaaaaggagatttgaggaagtaatcctcggtggtaaaaaaaagttggaaaagatatgaacaagaagatgaaagttctaagttttttttcttcttccctaattatgattttctgggatgggcaatgatgcctccgcaccagacactcacgagatggacggccgagatgagacgacgacagctcaacagaggatggcctccacgccccctgtccggacgcaatggcagacggggcacgccatggccacgtccacgtcgccggcggcgaagcaatcgccgcagaggctgaggtgcctgcaggggaggagcaccacggtggccggcctcaggcggcaggtgaggcaggcgcggtcagacccgctgcggcgcgggtccacgtacgccgacgaggacgactccgccgggcccgcctcgccgccacggagctcatcgccggacgcccgcgccgcggccgcggcctgctggagctgcgcgtggagggacacggcggcggcctgctccgagagggccttcgcctgccacgccgccgcctcgctgcggaggcgcgccagccgctcctcgagttccgcgccgcgccgcgcctcgcgctccgcctccaacgccttctccctgagccggcgcgccgcggatcgctctgccgcgacaagcagcgccctgttatggcgccgcacccgatcggccatcgcccgcctgagctgctcgccctgtccaagaacgtgccggcacatcacgccacggaaaaaacgaaccaccgaaacaaacggatcgtgtggggggcaaaatcgtcgattacctgctctttgatgaatcggtcgagctcctcatcttgccgcttcatctgtccggcaagctcgtcggagaacgagacgaacggcatgggcgacgacgagtagcacaaggctttcaggcgtttgctctcttgttgttgctgctgctgctgctgctgctcatccaatgccaggcgaaggccagtggacacgagtgccgccggcgcgcgggacggcgacgccgataccctgttgtggagctgcgccatgttgacaaacgacgtagactgctgcggctggagcgtgaacagattgaccaactcctccttggccggcggcggcgccatggcaatggcctccctcgagcgcttattcctccgattaatcccactcgctgcaaagaaaccaaaaccacatacgcccatgtcacaatccaagaaccgtagtgcggcggcgccatggcgcgaccttgaactccttcaacatcaggctatctatctatcaatcaatcagtcagtcaccaccacccacctcctccgctgggaaagtacacctccggcgagactccggcgaacatctgcggcctgggcaggtccatctccttcgtcctctccggctcacctctgtaaaccagacgacgaataatccatcagcccaaaggaggccaaacctttaaaacacgtagccgccctaacgaagaagaggagacaagccgcacctatcgtggaagaggagactggaagggtactgggcctgtaccgccattgttaagaaggaagagagggagggcgaggcgaggcgaggcgagaaacggacgggtgggtggttcgcgaagcgggaggtgacgacggggaagaaaacttcctcgcgtggttttaataggggtgcggacgagccgagtccaattccgagagcacccacttcgcacgcttgcttttaaaacctctcatcgcaaggaacaaggaacggaacgggctcgcaccgcgcgctcgctcgatcgtcgatgggaaacgagtgatgcgtgaggagggagcgttgcaccaataaaaacggaaaagaagggggcctaaatttactggaggcagaggcagtagaagaaagatggtagcggatatgggtggttaaaattaggatcccagaggatcgtgggtggattaaaagttaagcgtctgttcttgattttttttccttacgttaatgctgaagattagtgatcgataaatggtgtctgtggtttcgctgtgccacgcaataatggtggccaaggcttttggaatacgccgtagttagtaggaggaagttggaatacaaggacggaagaaagtttcctttgtactagctgagccattgaactttcgaaatatgagatcatctatctattttttttagataatggtgagatcatctatctatagatctaccaaatctttttctatactaatatgataatcaaatgaaatatttcacattatttcaggagacagtgaataagtatagcatttttttatgcgacagcccttaattagaacatgaataatggtataacatcttagtctaagaagagaatactccttccttgtaaccggcaacgaccgatctggtcagttgcgttgtgtaacaaaactgtattttttctaatatagtgacgtgtactccctccgtttcacaatgtaagactttctagcattacccacatacatatagatgttaatgaatctagacacatacatatgtctagattcattaacatctaaatgaatatgggcaatggtagaaagtcttacatcgtgaaacggatgaagtaatttttttacgcgttcgtgaaaaaaaagagagagagagagaagagaatgtcatgtagaatttaattttttaagtaatggagatgagagaagaataccgtattaattaccaaacggtatagtagacagcttaatggaataccatatatacaatatgtatattatctatataacttaaataattaattgtaatatattattagacaacatttttataagtcatctatacctcgtctagatataatgtgaaaatattatcgatagtggctgtacgaatcattgttcattcaattcacttagattataaggatgaacaaactaattacaacttgttaagtacttagagttatttagtaactaaatcattaaaaaaagaatttaagcggagttcgactttgtatactgtaatttcaaatttatggattatctatcaagaaaaaaattgttactccaaaccatgatgttatatttattaagtagaagcacacatgagttgatcaaacatataaatttcaaatattcaagagttcggatttgtagatttgataatgtactaaactgaactctgcaaccattagagctgggtacttattaatattcaatcatatcattaaacaaaaaaaatacaattgtgactctaaacccaatataaccttatatttcttaatttaatcagaaaaatagcattataacccaatgacaagtatactttgaactccctccattttcagattataagtcgttttgactttggtcaaaatcagactactttaaatttaactaagtttgtagataaatataagtaatatttataacataaaattagttttattaaattaataattgaatatattttcataatatatttgttttgggttgaaaatgttaatattttttttctttaaaataatttaatttaagaaaataaattatggaagtatttatgagaataaaagagtacaattatccttgccccaacaaaaatttcataggcacgtattagagcagacgagctacgtggcctggcatagagctagcgaaggccgttgcagtatcgtgacacacagctcaatgtgttgcttctacacatttttagttcatagaaaaaccagaatcattaaacgatattcctacctcctaaatatatcacctaattgtaagctaagcatagttatgatattaagtgacgtgacctatcttaggcgtattacactgtagcattgtcatcaagcaatattatgttatgggtatctcaactaatatcttgtgacatggaactcccaaccatttaatgacgcatttagccaccgatatttatattagcacgtatatgttgtgtacttctttttgcgaggatatattctgtgtactttggcgaatttacgtttcgacgtggacgaaacgaacatctgatgccagcgacaaaattcatgttttcattcctcatgagaagcttccaaatacttgattttccaggcgccttcattccagctgtcaaatattcaatcagaagctgcaattataaatgtacagactaccgagtataaactgaggccccaagtaacacgttgcgttgcttctcggcagataagagaaatgcataaatacaggggagcaatcaatcgttgaatttgtagcgttgcctccttttcaagtacttgctgttgttgataaggaggagaatttttatggagaaaataaaaaagaaaacccgtgtcttgttctagagtgtagtgtgtttggttttatggcagggctttgtttgatctttctttccttttcatgactttcattgtcttgcgggggaaaaaaaagaagggacggaaatcaggcggagattgaagcatccaacctactcgagtggttgtcgaatgctttggtttggatttttgggattctttgattgatgaaaaatgatgaattgaccctaatgctaacaatgacatctgttccactggctttctttttatatttgtaacaaataattctccatgttttgattgagtctagctagctagctagcttcatatatatcctaataggttaataccaaacttgataggggatttgtgaggtcgccagtgtcatgtcgtgcctgaattggagattaacaagcaagcattgaaaattattgttgctttccagttggtgcttcctatatacttctagctagcagctgcaccaatacacacatgcatatcttagctgccaaggactagcaagcattggcgtgcgtaggacccaaagttagatgcaggcggagtttattgactactagtaccagttgtaagttgattgagatttggtaaacagcattaggaccaactagaattaacctctccacttttaactcgacatcttcagaagcatggcgattgaagcaagaaaccaaagatgggagggaggtgggggcaaagagagagagagagagagagagagagagagagagagagagagagaaaagaagaagaaaatgtcctctagaatattgcttgagaccgaaagattcaaaagggagagctggctagaaagaatcaaatgctgccatctttgttcccaaggtgcttgtcacttgacatgcaccgttgcatctaccttccttgcaaacaacccctccccccatgtcaattttcgcaccccggatttaattcctcagccttttaaaaaaatttccatccatcgatctgcacgtgatggcgattgattctgcacactatagcagcaagtttacctgtagatgtgtagagccatctggagaaggatgcataaactaatcatcaacggcgacaaaagtatacaattcgctggtggcattgggggttaagctagcctcgaatgtatacttcacctgatctagagacagatacagatatatcatctggttccctgcaagactagacgacgcgttcgatcgtgggcacgcgattccggtttggaaatgcgtggcctcgtcgtcaaacccaacgcaaatgcgaccgaaatgtcaatcacaccaaacccacacaaacgcaacacaccacaccactactactcctatactaatctctttttgtcagagagttcgtggtattgcatacctacaccggatttccggattggtttgatccccgttgtttaattaggccggtacgttgcaatcgcgaagaaacggccggtcaaatccggcgtggccaggacgcggccacacacgcgccacatcacacaccgagacgtacgtacaggcagcttcgcggcgccggcccggcgcgttggtggcgacgacgactgagagctacgggagctatagtgtgcgctgtttcagataacgcgccggttaggtctccgacgcgaacgcatgcagagaggggttaagtgcgggcgaaggaaaggcgggggaagatgacgacgacgacgtactcccatcgatcgatgccaatgaaatgatccgtccacggccatgcctgcactgcactgcaacctctctcttttctttcgcaagtgttccgggtgggcatccatccaactgggggcgtggcatgtgatgcctcgttgctcctttcgaccgccgctgggtcccctctctccctccatagcttggaagcacgcacgtaatactagcacctaactgttgaagatcgatcgatttttgcaattcttccggagcggaattgttgctagtggttgttgctgtcagaggcaagcgaccggcgcctagctagctccgatcgggattcagatcggtcgaccgagaccgatctgttggggtcttggtatgtacgtgcgtgtacatgttagttgatcgtttagtaactggtagttggagcttgtttcgcttgctcaacaatgacttcgtttaattatccatgcagagaaagaaaattagtgcatgtacaatggttgttaatagtggtctcttagcgttgctaattaggaatacttgttgacatggaggaaagagaaagaggagagacaaaacatcgttgttatgcatgacaatggcttaacaacgactcttagtcactataatatgaaaatatggttgcatgaggatataaatatggaaagaatattaacaaaaggaatattttttgagttaatgattaaagcctttgtcatctcaactattgtaaagatatggtctctaaataatcttatattgtttaagagaccatacccgtctctaccattgaacatgccctaagtccctgacagagacggtaaccaaactaaaaaaacgatctatccggatggattgtaaagacggattggcggtacgccatataagtaccttcaaaatcccctgcatgccggaccttgtcaaatttcacatgcatgtacttgagtgaggttaatggaaccagccaaccactaggattcaatcgaaacttcagcgcggattacatcgatctcgatcgtgttcacatgttgatctagtaccggcgttcatgatctttcagcaaaagcgatcgaatacgatggatgttacagttcacgaccgtggtggtcgcgtcaaatgtgacaacgaactctcctcccgtcttgacatttgaagcttggaccagggcctacctgtcactcgccggcaatgtacattgggggcgagccctgttgctatccgtctctccatatgcttggaacccgtgggtttgcaagcaactagctagagagcaagtttactagtatagccaactattaattttaaataatctatagttaattaaatagacaattcacacaatagttatatataaacatatactacactattaatacatggtcccacctatcatatatacactatgtcttaagtccgtgctgtaactggttataaatctgtatcctactgccctcttctctcttctcttttatctcatcgatatatgtttatagctgatttatagtctgctattgtacccctcctagtactaatataaaacacatatgtacgaatacctagtaatattatattccctctatttcatattataataactgctttaactttttaagtcaaacgtctttaaagtttgataaattttatagaaaaatatagtaatacttgtagcaccaaattattacatttaacattgaacatattttgatattttttttgtttcgtgttaaaaatattgctatatttttctataaaattgatcaaacataaataagtttgactaaaaaagttaaaacgacttataatatgaaacgattgtagtacacttaatattgtctccccgtttctaaatgtatattgctattaatgtttagacatgatttgactgtttgtcttacttaaaaaatacataaattaaatattatttttatgttgagtacattcaaccaaactatggtaaactataaatttaagatgatatatcacaaaactatagatttaataccaaatttatcacataacttgaaatttttcaccaaactacagatctagtaatagttttgtgatatttaaactgaaacatgtagtttatgataaatttaatgtttaattaatatttttgtgatacaccattttaatctatagttttataatagttttgtcgaaatatccatagtttttatgaaatttactctttttatgttaaatgtactttaagcatgccattttgttcgtattcacaacagttatgtaacaagatgaataattaaatgttacatccaaagtcaacaacgtcatatatttataagtataaaaaatatttttctacaagtcaaaatttagtattggatactctaaaaatgtgatgtctaccggagggcgggaaactattttaaactctcgagggacatcccttcgttattagcattccatccaaatggttagattaatatgtgataattaaatcactccacaaacatgcactaccatatttaatgtctacaagttgcaacgaacaaaaatattttttgactgcgaatatacgttaactagccatagtttaatttgtttttccgttgcaacatgtagaggttaaatttaaactttcatatttgtggagtgatttatgatatattaatatatctttttgacttttttcaaaaaattttataacaatttagataacatacaaataacgaggggacgtccccttagagagtttataattcattcccatcggaggacaccctaaaaatgtagctttggttgtagacacctaaccaaacatgctttttttttctctaggacaacgcctgcaatattatattatttccgactattttagagggagaatcaatgtgaaatgatgagaataatgttcctagaaaaaaacttatgtatttaattggaccaagccacctcgacactgtcacgtttacaactgtagtcgaaccacacctcaaattttgaggggggtatgctagttattttgcaaatttcctctatccaagttagttaaaaatgataaaataatattaccctcattttcatgcattaaagaaccatagatttgatgtgttcatgggcatagacacatttttagggtattaacgagtaaataccacgtttttttttgcggggaaaataccacgttcttagctagtgtggtgttgtaaatttttctctttttttttgagaggaataaaattttcttttttatacaactatagtagtagcctcgcttgatgtaaaactcaaggaatcgcaaggcatgcatgacccagacttatgtttctttgtacgagtgcatgcatgcacggttcaaccttagtttgagtcatccgagatgtattgctcggaacagccgtcccaaatggctggcaattaagctaatctaaacctgcaaaaaaggcgtacgtatggatgcatggatgcggttcgatcgtgttgcccccgtacggtttcaccacccgtcctgttttcctgcgtgtaaattgctcgccttttgcgtgttcttttcctgagaatataatcatgcacgcacaacgcctcgctttcccctgtgtaaattgctgccgcctgcgtcgtgtcgaccgatcgattgactttaaacaagaggagaattggagcgcaaaggcaggcgaggaagatggcagcagaagtggagtggcgagtgctgtgttggtgttgccgcctgcctggtgcctgccggctgctagatctggtctgtggtcgcccaatcaatctcccccgtctccttccctgcagattcccccccacgtctctcatattttttttgcccggtttctctcatcgctagctctcgcgccgtccgtttccgcgacgcctttctttttaacctgtggagactggaggagagcgctgctgccgtgccgagatgtgaacggaatcgcgatacggtgcaagcaagcgagtgcccccggtcgtgctcggctcgtacgcgcggacacgcgcggcgcggccggcctcgggttggacgagcgatgggtgcagcagatgttgtcacgcatcaccgctggatggatggacccagggggtagctgtgacgggagcaacgaataaggcgtgatgaaccgtagccgcgcaagcaattgcacaccggggttgttccattccatctcaacgtcattcaattttccccggattttctgcgacgtcgttcggttggtttggagcagcgccaccgctagctatacgcgccgggggccggccggacgtccggtgtgatgctttaccttacaccagtacaccactcagaggagaaaaaaaatgaattattactgtttatttatttattacctttatttatttctgaaatttgtgaggtgggtgactttgccgtatgaccagggtaagtggagggtgtaagggatggaatgtgtgtggctcctaacctagattcactcgagtaacacaaggctaagcttttatttttcttttcttgattacatgaaagacacatgtacagaatattttgcacgtacattacattcgcatcatgcacctgcaagagtgcaagggcatctctttatcacaggtttaaagaaaccatggttatcaataaatccctagcattactaaattcttattgaaagtgtagccttatacgtgtaagccattcccaacccaatgactagaatggtgtccatagcattaaataagctatcacctaagatgaaaaatgatgtggcaagtgaataaatgaagaaatagaagaaaaccatgtcttgcatgagacatggttcctacacaacatccaagatatcatgtgagataagtagcattaaatttaagtatgtaatagtagtgattgcattggaagagtagtgtctagtactagttttcttgatgatgtggagtttatggaaaccatgtctaatattttaggttgagaatggcctaatattcactagctaagttcttagtgggaaccacaaccatatatagattttgtagggcttttataccaattaatgaatcagttcaattctactattgttccaaagaaggcctaagattatctctggtagttcccaaatatccttctatcaaagaaaaaaaaaatacatattcaggatttcggtgtctaacagtttacccaataccttccactatccccaaaagttattgactcaataatccatctcaactccctcaaatatagggaaagttgcaactcccacataaagtagttgtctctcctattactgccaacatgcatcaccagctcagctggccgtcgaagacaccatgtggatcatctaagaggtgttgtctaaacctcagtggccattggccactatccaatcgtccacatgtcatccatcggctggtctatccgagccttagtgcggttctttcccacgcccttacttggccattgcttgagttccacctccccccactcccgtgattatcaacaagcctctgccgacaaaactttgtcgtcggcttggcctccttgagctctaactgtggtcagcccctgacgttaggggtctttcgcttttgctagatctctatagagatattacgagtcctccgtcccaaattcccttgccgcaaccatctggttcaccagtactatataccaaaaagtctcatgcttacgttactgtgactacacttcaccacacctagggcttgaccctgccaaaccctggaggagttgcgtccgatgcaccgccaccagcgtcgggaggtcctccatcactactagcaccatcaccggagagcagctccgtgcgagtacctcctctcctcgtcccgctcgagcccccatgctatcagatgtcatcactcgaagcctgctctctcatcttcatctgacatatagatctcattaatactgggatgagatattggatctatcaaaagcaccccaataaccatgaaattggtatttgggaatctccaataagccaattttgcagatgggatatgaatatatgatagtgggatactgttggagatgctcttacatattacatggcttataataacaagtttgaccaatttttaccatttgaaatcaattatacaaattttaatattgaaaatgtatctttaactgaaattagtgaagtattgtcttaaattcaaattattgacctcaaaattcaggaattctgatgaagtgccaaacacaacgaccaaaaggaatactccaaaaatcacttaaaaccttctagctgtgaggattatcgatcatgatcggcatgaccagcaggctgacttaacaacttggtaaattaaaattaaatccataagataaaaaacaaaatagcgagacatgcatggaaacatctctagtgtggacatcggtgctttggcattatcaaattaggtttgacatttgcacgcagaagacggctagacctgccaattaacaaggcacatccggatcccatgttgcaagcttgcaatggagaatacggttacagcttctttgagctgacgtgaacggtgttaaccatttacttctaaatggcgcagtggacctgctttgatagaactatccgcgaatctgaccaaaattaacctctttttttaaaacaaaaaatgacaggaaaacaacggatgtatcatgaatggtgatgatagctagcttggaaactggaataacgtttgtttgtcgggttcaaagaatggctacgtattgtggctagtgggggtatttctacttctctatccaagctgagaatgcgtacaatacagcgcaatcatgcgcgatatttgcctgcagatttctggtcccttgcgcggcttgcgcctaaaacacggccgattgtgtcgttctctcgcagaaagagtgagcgagaaattaaaccaaaaaacaaatgcaaagtgctgcatccaaagtagagtgaaaagtctaaagagacgcatcgatgttatcactatgggagagggaggttaagaatcacatcgctggaaatcactatgtatatatgcttggttgtcatatgctgtgtgtgcttccattgtcacgaacgcatacatgacaaaacatgacaagtcagcagtgatgacttgatgatggcaaggggggtggcacgacagaatcatgcccgctggtgatcttatcgacctggctggctatgggccacaacagttcacatctccttcgccaatgtaaaattagttagagttaatttgatgaaattgttgtttaaaaaatcatgagataataagccacaatatcacataattataattgtggatgtaacatatcatttatcacgaaatgacatatttaataagttgtagtgccatattagtacatagagtaaatgcattagaggttaaatccttaccaccaaatcgtagtatcatactacaacacacattaaatacttttacggttcttaagaaagcatctacataaatagacaggtatcaaaattttaatatctcgagataccaatgcaaattttacactagaaaatgtagtatctctagttgtgtatttgtgtgggaggggttcatagtccacttagactgtgttcttccccctactttccttactcacatctctcttttttcgcacacacgcttttcaaataactaaacattgcgttttttttttgcaaaagtttttcacgggaatgttgctttaaaatattaattcatttttaaggtattttagactaatacttaattaattacgcgctaatggaaactacgtgcggggaggtggagtttccaaaaccttatcattgttattataagtttataacatatctttccaaatttataagtgaaaaataatccgtgcaatctctagtttaacgatacaatagtttataacgaacttgatactgattttttttctatatcttttttcaaagtgtatataattatatgaaatttacttaaataagtatgattggatggcgcagtcgtcggctgttcaccatgttcgtgtgcagcagagaggttagtttcgtttttctcgtccggtagctctccatgccttgtagctatagctagcatccagccttgcttttgtagatggagcaaccctgtcagctggtgaatgttgttgcattatattgagcctaaatcaacagagatagatatataaactgtagttacggtgtgacttttcagggcaccagcctctcgtgtacttgtaaaagaaaaagacagactggtgtcaggttgcgcaattgcttattattcataatttcttatatcgctcatcagctttgcgaaatggatgccattagctttgcatttcaggaacgagttggatgcctcaactagaagttgttgctaaccacactcgataaggcacggcacttgcaaaattttcctgaagctgaaagaaagagtcagcacgcacgatcgccatcttctgagcaaaattcaagagcattcaggagaaaagaacttaatcttcattttcaagagaaaagaataccacctaataaaaaacttaatcttcatcttcagaagaaaagaataccacctagcaaagccacggatacagacgtacagagtatactctaccatgagctgatagacttttcttcgtggtaaacgaagaggattggcagtattattacttttaccattcaccattgccattaattaacaaaggacataagaattcccatcagcatctgaaagatccaaatgccataaacacgattttatgtaggggaccctaaaacagggataggcaagcttcatgtgacatcctttaataccaagaaagatcatataaaatcgatccaaaccaagtgaaatctcaaagaaagggagagctggtctgtgtgtgagattggtcagaggacaaaacaaaggctggaagtcagggagagggaggagaggagtaccaaattcccatgaaactctcaaccccaccaccctcatgcgcagtgcgtagtagtatttatttccccgtgctttaaggaaagaagagaccaaagagatctgaacaaagtgggggagcagcctccttacaggaaagaggaggtgcgagtgatgccatgacaatgaagagagatggtgcaacggcaactgaattatatactctactatgctcgtccaacttggcaggctggtgccaaagagtctgcctcatgcagtcctgctttcagatatcactccacccaaccaaacaagcaagcattattgcatctgccatgagaattttacacaaaaatgtcaattgaagtaccgaatacattcaggtataataatgggaaaacagcagagataatgtcagtaatatactccaacaactgccaacatatgcaggtggcatgatgcatctacttgaactgcatacatgacactttaacagcagtacaggaaccctttaattttaacaaaagattccaacagcttgattaagggatttgggcacaaggcaggtaaagtgcataaacaaccttcatttccaggcactaatgagagactttcgcaacttctcatgaatcatggccatcaccaacaccgtctttctcgctacttaatgctgtgctagaaccaaagcatatgggcgtcgtcagaggagagctcctttcctttggccccaagctcacacttctccatgccatgctctgatgctgctcctcctccccattgtttagcccacctactcttctgtagtcctgttgcctccattagcaattcttgtctccgttttctttttttccatccttttcttcttttctttctttcatatcctgctcagtcctcaccttcttggttggataaacatgctaacgtgcagctagctaatgtgttttggactttaattattatagtaagtgatgctacgggagactgatgagtgtttcctggaggagcaccaaaccacaccaatcgccatcacatgcactgcctttatattattacactcttctgatccttctcatgtgagcagtgcaaaggccaccactcctcccttctctggtctcaacagctgcacttgtctctccaatatttgcttcctattccctcttcacgcagcaggacgcagtgactgagactgactcctcttgtatgtgtgcaatctttaagaaataggagtgtatctctctgtatgtgtgggtgaaaacatcataagtgagtgactgcacactgcaacaaagctgatgaatcagagattcacagctacactctctgcgggtcccaagctcatgttgcctcaactaagctaaatgcaaacccgtggcttagcaaagtggcattatagacatgaccctgaaaaggttccgacagagatgtgtatatatttatcctgcgaggcatgcatgccttgattgctttacttctttgctccataaaccctgataataattcagattttcactgttccaggcagcattgctgtcttatcttgatcaccacttttactatagccattgagcaaagtaaagcaagcaacaaacctccatgcctaacagcattaaccaaccaagctagagggatctgtagagagagcatctgtacctgatcggcagtggcattggcatgtgcatcggcccttccctatgctatgctgcatctccatatcacaaggttccttcccccatcatgcattgggtctctctctctctctctctctctcgctaggccagctctgaccccagatttgtttctaccacgcagtgcagcggcagcggcagctcccacaccattactccccatctgtgtgaagtgagagggaaagagacgagtcagatacctaaaattgtgatggactgatattattgtcaactaacgtgtgcccccctggctggcatgcccttccaaagggtcggccctgtgcttgctgctttgcccatctagtccacggcagcgttgcactgtcttttgatgcccaccctaatgggagccaggataccgaggccggccagcccagcaaccttactcactcatcagtcaccggctgatgcaaaaacatgcagcaatagggacgctgctggccacactgctgctggttctagcctggactggactctggagaggaaaaaagagagaaaaaggattgcatgaacgggtcgccattgtaggcaggagtttaatttgtttggattttgcgaggcacgggctgcagcaaggccaacctcttcagtcctctccaccccacttcttgatgacagtcacatgctcttttttaaatataaattatgtttttcaattcttttcttatcttttgaaacaaatgttttctgtttttattttcaccaggcatacaaagaattacactttggactacctcgactctcttctcaagcgcatcgacgactttgagtacaacagctcctacataccgctgaaatcccgcacaccgatgaactccaataccgcagctagtttgaaataggatgaaagaaagtttggatgatccgataccgtagcttctagttggtcaaatgttagcaccataatcacatttcgtccattgcagaaaggatgattttatttttgttagtgctgtccacccattagaaagctccataaggagccagctagacaattattttgcaacttatcgtgttgactgcatctttcatgtacttgcccccttagcacaagatacaacctaatcgaaccagcatcttgcgtcagggaaagaaggatcagatcagtttgcttcagcctagtttagacgctaagaagagaaacctaacacatttgatggcagttagttgaatgcaggtacatggcttcatgggtcctaaaagtaatgaagcctagttgaatggcaagaatatataaggcacaaggctagaagcccattataagactgccgcgaaggggatgctttgctcaatcacaaggactaatggccttgtagactttgcaggtaagcatggacaaagaaataaatatatatgtttaagatgaatctaatgctgcattatggtactaccacaggtatgcagaagtactaacaaagtcatgccgcaaggcccactaatgtccgtacacgcttaatccaactctgcaaccttatgatagatatccactttatggatctcttctacttttccttccattttctttacatgtattaagtagatatttcaaaataacatgtattaagtatacgtatacgcagctcaaagaaatgggtcataaacaaattcagagattcatatattgatatactaatgagcaaccttcgtcatgctaatatggtaatgtaataaacaccattgctcttcttatcttaaggaagaagcataggatgcatcaagacgcctgcagatatatccatcagcattgttagatgccaccgagaaacatgaagagaggaacaggtgcacgataagagaatgggaataaagctggagtacagacgaggaaagccacaagcaaagctcattggtttcaggggttatacacaaccagtaggaaagtggggatggtacctcctccattatagtcaggacacccacaaatactatctaggatccttaaagaatacttatgcaatacagccagcagcttagagattagcaccaaatggatgccaagtccattcctttggtgagcatgatgccaccaagagaggctaaatggaaagaggaaaaatgaaggaaaaaggaggcatcatggaaggaagctttggcaggtaaaaagaagggagagaattgctccacaggcatccatggtgggtttgttacatccttaagttgggtgagtaagaagatgctgaaagcaaagcagatggcgatgcatggtgctcagtaccgactgccagatagcaactgaagtttctcttctttcaagatctcaagttcagctgtgaccaaagcattttccaaaccaccctctgttgcccccattagaaaaaaaataaggttggatactgcaagagcaaagcattttggttgtaaaccgacacatgagaaatgcaagatagagatgtgcataatgagtcatcctctccacctgtcaattacaagacgatgtgctaatggccaagtttggacaagtcttctacaaagacaacacaacaaataccagctatttaaagtttttttttgaacaactcgcacaagatggtgcgaagttctattgatagagcagaagaaaaattacaagattacaaccccgtaagatcgtaaccaggaaaagaaaaaaaagtataccaccacccacacgtcgacagctccaacacacggaaccaggagaagcctagcaccgaattggccgccgctaagctatttaaagtccacctatactttctacctcggtatgcatttcaaagtatattagtatatccaaagttaatgaagttactggcttgggcatttgtttctaagcatgtccacactacatacacaagctagcttttcacagaactggaaaatatatgatgaaagcacttacatggcaatgctgtggcatatagctttacctcttgctagtgctcaagaccaccacggtagcatattctgcacttaaaaatattcataacacctgttgcaagatgtcactaaccctgacctcaagattttttattttttttggagatgtactgcatctactcgtatttcaacggtggcgttcgttttcagataaacaaaataattagctagtgcgagtaatagcatcctacgttaacccgtgacacattttaaaaagacaaagcacttcctcgcaaaacgcttgctgcagatatgatgtccagaaaaatcatatccggagcaccacttgccgcttgctccaatatatgtcaatctgccgtcccctaccatgccaccacccgtcaatctttccaaatctaaaagtttggcaaacgagagagatagccagacggaggaggaccttggccaaccaaatccaaacaaatttggaggatagaacaagcaaaagatagacaacccacaaacaattaagaggagaaacattagccgtaaaatactcccatttgaaaagtactactataccaagatggagacgcagcttactttgcacgcaagtatatggactctggagtgaaaatcgtggtgcacggacaaagaactaaccggcggcgacaaattcttacagtcaagttatcattggcattgcagagggggaaattaacataggctatcatgggagtaacatgctaatcgcaaaggaaccgcactaattccgaaattggcaaactgcacatcccgtttcaacctagcttggcaagattaattccataattttgcacgagacagcggaactagaagaaacggtaggattagggctttttcccaattcccattcgataatcaaaatcgcccatgtcggtgtctagaactccataagcagcagacgagtactaaccgctggggtgctgatcacggcggcgaggggaagagaggcgcacgcggcgacccgaaactggcacgccgggatcggggagaacagcgccgccgtcgagatcggggaggacagcgccgccgtcgacgccccttcgctcctgcatctccgcaccggcggcctgtacccggactatgggcttgcgtggttgaaggaatagaaggccgaggagttggatctgcaatctgcaggccgcatgaaaagtgggaagtggctctgggcttttggatttgtttacgtatgcatctattgggctatacgttgaggcccaatgggctactatgcatgtggaccgttaggtacgagtttttctatttttacattttttattaaaaatatttaaagaataatttttcgtttcgaaaatttaccaatacgcttcacgacagattttaagtgacaatgatagccagatgatctagcgagtacgtaccgatattagcttgcgactgacctatgggcaaccgtacggtgcgagcgctcacgatcacgagcaacgacgataccaccatctacggtaccaaatgtactttattctatactgtaccaaagtagttctgcacttcacttatgcagtatgctgtgtggggtctagttacggcgaaacgtgcgactcgcacgtaactaaagaaatttgcatttgaaagcaagggggtcattaattaggaactttggtatagggattttatagaattaaaaacccctttatgatttttttcccaatatattccctctgttccaaatataactatcattttactttaaatttaaatattttagaatggagggagtagctctttagtttatagaattttgtttgaaaaattcaaaaagaaaatatgttcgtcactttttggagttcgtcgaatatgaacttactttctcaatctcaaaataaatcaatttgtatataaaatctggatggagtaaaccaaattgtattgatttcctttgagaagtcgaaggaaccatgtcttatcatctctcctcttaattctattcaaacaatattttctcattaaaatcatatgattttcataagtcaagtactatttctgtcccgtaacttcttttttagtccatattgcacgtatcaatacaaaactaaaaacactataatatctcactttaacaaacaccaatatatttcccatccattctagcaaacattaatgtgtttgtcccattttaataaatccctatgtatttgttttccactttaacaaaatcgaatgcactgactgttccaaaataaaatctttgtggaacaaatgaaaggggaaataagtctactttgatttttctggacgagacattctttatgttacaaaaggggcccctaagatgttcctgtgtgcaaaaatgcatttttctcatgcgtcctcataagagacccacctacaaaactagacttattttattgggcgggcttcttaggtggctgcatacgaaaatcagattttcataggcgctctataagaggtccacttacaaaaatcaatgtgaactaaatataaaataccaaatcctctccactcctccacctcccctcttatcctctcatcctccacactctctctctctctctcacacacacacacacacatgcatgcacacactccctctcgtttgtgcggctggcaacgcaaccaaggcaacagcggcgggtgggtcggtgactggcggtaggcagaagtggctggcgccgagctggagtggcggggagcttgatgatgatggatccggcatggagaatggtgggagtggaggtggcagtctcggcctctcgggcacggtagcggccttggactgggcggatccaccacttgcacccacaagagtggcatatccgcccccattcggccagggatggtaggagcggcggcggcgatttcggcagcgacaatgatgatggtggcgtcgacttcgggagggacgggaggtgtggatctggcggctcttcctctcccacgcagatcctaccacctctccctcacgcattgctctggcgacgaaccttgggcacgggagcaatggcgacgggtgatggttgcttgacatgggagctgctagggtttcagttttttttttaccgatttttctttttgccggcggatggcataacatcccgcatgcggaaataccctttttgtgtgtagttgtgcagcttacctgcaaaaattgctatttttatagacacatgaggtgcagacggttgccacatccgcctatgaaaatatgatatagccatatggaaaaaacccattctctctttccggatggagggaatattaaaatgacccattcaactcattctcgtgtttttaataattcctataagttgacaaatggtgtggcattcaatttcggatggctcgctgcccccccccccccgggccgcttagcatcaagcagccaggagcgctagagcgtagtcgtattgttcccccgagagaaatttccggtgcatctcagcttatattttacaatataaaaatatccatttagggtctattcattttggataaattatttctttattctaacatataggaatatgaaaagtgaaaaaaatagaaatgcatgcacattttaacccataggaatttccaacaggttcgagtggatgaaaatttcctatgtttcctctcttacaagagaaaatttgtatttttgtatttggttttcctatacctacgttcctatgaaccggatgatgctaataggaattaatccttagcaatctaaatcatttggttttccttcaaaatgaatgggcccatacttttgaatattagtaggaaacaggaacgctgaagcagtcttttagggagtactccactataattgttcctctatagtccccttctttcctctccttccttctaacggaatggtaaaattagagtgaactgaaaagatcgagaattttggttaataattccatctgaggcgttggatagttgaaatgtagttatttggttaatccaccacaaccctcagttaatcaaataggctaaaattcggtccaatagacttaaggccaacaatctcaaaaaactatcattagcattctccaccgcacaagccggctgatcacgactatcctcccatccgccatatccggcgctgccatcagccgagaatgctaatgggcgactagtcgcctgtggcccgggccgtgcgaccagttccactcattccatttttggctcaagcggttttctgcttttcctttttcttttttgatttttctcatgggcttcattatttagcaggccagttcaattcgttcaaccagactgatcagactttttttttcttttttagcaagccactcctattcaaccatgtgtataaagtttgtatataaaatttatacataaatattctatatatacctatataaatgctatatataagttgtatatatgtctatatatatactttgagggaggggaactaacccgcatggacgcgcccccacacgacacgaccaacaactaatcagcggttgccgcctccacctctgttcgcccgtgtgctacggtcgtcgatgctgtgcttatagatggccataaggcccgaggcccgaaggcccggcccgacttgggtcaggcccgtgccggcccgacctccgggccgtgcctgggcctccccaccggcatgctgggctggcccggcacggttgggccggcccgacacaatgggccagcatgccaggcccgacatacaaagtatagggactaaaaatagactaaatgtcactgtccaaacaatagggaccttaaataaaattattttagctatttatatatcacagcccaaagaatagggaggtaaaatagacttttttaggtatatatatgtcacagcccaataggagggaggaatattagacttattgtgagaaaaatcacaataggccatcgtgccttcgtgttggcccggcacggccgagtcgtgttgggccatgcctgggccgtgagtgcggcacgtgggctgccacggcacggcccggtgcgtcggtcgggccgtgccggcccgacaagcctcggcccaggcacagccggcgtgccaggcggcccacatggccgtctatagctgtgctagcctctcggccacccaccgccaccagaattttttttatttttaatttttttattaaaagttttacaaaaataattttccattttgaaaattgacggaagtggtcgcctaccgccctctgggagggcgatttttaaaaatcgccatcccagagggcggcgaaaatgacgtggcagacggccgttcgctctcgggcgacggccgtcaacgaaatttgcaggcggcccccttgctgccctccgctagggcgattttgtactgtgcgggggccgcctgcaaatgggcggcgagggggcatggaattttgcaggcggcccccttgccgccctgggggagggcgatttttgcctcccccctataaagcccagtcccccctctctgaaatttcattatattcactaaaaatccaaaaaaaacgaaagagagagaggggagggcagcagaaggggagcggcgaagccctgctggttcgctcacttcatcacaggtttgctcccatacatcttttgcatttgtactaatatgttatgtttgagtatatatgttgcgttttagttttagttccatatattttagcatatctgtagcacacagcacatatgtgtagatccagagcatagaatataatagtatgaattgagacatagacagtagtgttaattgtaagatgtagtttagtttgatctggagaatgtaacctacttttagaattttggagaacaatattgtagagaatgtaacttagggcgtagtacagaaatgcgaggttaacgcaattattgttttcatcaggcacaatgtcaaataaggtcacatttcagatagttcacggtgaaggaaatattagatttggtccagatggtgttgatctgtcagattttgtaatgacatctaagggcatcgataggcctgcggagagaacatttcagtcaatttatagttggttgttgagaggatttagaatagaccaagaagtctacacaatgtcagtatcagttgtagtgagtcgtgcaacagaaggttatttttgggaactaatgccgatggacagcactgctgcttggagacggtatgtggaaatggcttttgaacggtcatggcccctcgttatatttgtgtcggtacaagagaaagatataaatgtttcaatgcaaaccgaagatgtagagggtcctatcaatgcaggggatgttgttggaccatcgatgcaaaatgaggaaaatcaaccaagggaggagcaggccatgggcatggcggatgagggggagagagtcggtataattgttgatgaaatggagagggaagattcggataatgaggaagcggacgacgacgcatcatccgatgaggaaggtgatgtaatggccactgattgggcaaatgaggacttctctggacttgttatatcagagggtgatcatgtaccctgggagtataaggagaacgaggtaattgacggtgcaaggtatgctcataaggatgagatgaaggaggcggtgaagcattgggcagtttccttgcagagagagtttagggtggtcaagtcaacaaattatgtgtatgaagtgaggtgcatgaaggaagattgtccgtggcgtgtccatgcatataagggtaaatggaatgattattggaaagttagcattgtgaccgagcacaagtgctacttacaaggggtggagaagtatcaccgaaacatcacttcagcttttgtgacaagtgagatgtacagcagtgttgttggtaacattggctttgaaccaaaatcaattattaggcacatcgataacaaattcaagtacaccataagctatgcaaaggcctggagagccaaacaaaagattattgagatgaggtatggcacatttgaagcttcttatgataatttgcctcgtttgttagccaccattgcccagaggaataataatacttactatgacctacatacatttacatcggttgatgatcgaacaaagagtgtgctgcaaagagcctttttctcattgggtgcttgcatcaatgcttttgtgcattgtcgacctgttctatgcatagatggaacttttatgacaggtaaataccgaggtcagatattgacagcaattgggtgtgatgggaacaaccaggttgtacctatggcttttgcatttgtagagagtaagaacattgaaagctggtactggttcctagagagagtgcacattgcagtggtgcgtatgaggcccaacgtttgccttatacatgatcgtcatgcgggtatgttgcgggctattgactacttgcagaacggttgggatgagaagggacttccagctaagtggcctgatgttcggagtcggtggtgcatgcgtcacatgggtgcaaatttctacaagtaattcaagaacaagcatcttatggagctctttaagaggttctgtgcacagaaccaagagaagaaatttaatgagttgtgggacaagttggatgagttgacaacgaagcaaacagatgagcaatctcgcagaccacaagttgaaggtgacgagcctcccatacctcttggcgcattacatgatgacccaccaacaatgagaaggaggtcagggtcgtccatcagaaatttcactcagtggattgagaatgagcctaaggagaagtggtctctattgttcgacaccgatggatctcggtatggcataatgacaaccaatttggcagaggtgtacaactgggtaatgcgaggagttcggatacttccattggttgctattgttgaattcatccttcacggcacgcaagcgtactttagggatcgatacaagaaaattggtccgtccatggccgataacaacatagtgtttggcaacgtagtgacaaagtacatggaagataaaatcaaaaaggcacggagacatagagttgttgctcaaggcacacaagtgcatcggtatgaaataatgtgtgttgataggagcaggcgtggtatctatcgcaagcaagccgtgcaggaatgtgtcttgaaggcggatggtggatgtacctgcagttgtatgaagccgaagcttcatcaccttccttgctcacacgttcttgctgctgccggtgattgtggcatatctcccaatgtgtacgtctcaaattatttcaggaaagaagcaatctttcatacatggagtgaggagatatatgggttcgggatctcaggatcttacacaacactgagtgcccaagttttttacattccagatccatctaagttaagggtgaaaaagggtcgacgccaaactagacgcatcagaaatgatatggatgagtcagaagcaggtgggaggactttacgctgcagcaagtgtgatatgcgcggccaaacttacaagaaatgctcgaagaatgcagaagttccaagcggcgcagatgctagtccatctggacaggcaagtgatggtaggcgaccacctggtccagcaagtgatttgcagccgggatttgcagccgggatcttcggtactggggcctcttcgtctcacgccggtaggactggtcctactagccagttctacgacgacgacttgcacggtgcacaccaccacgacgtactaggctcctctcagcttggaggagctccagaggcgcacactcaggagcagccagaggtcacacctgtacaggcaggacgggttggccgtgccgtacccccggaccgactcacgtactcccaggggcacattagggcgcagggtaggagggacaggggtaagaggcctcgtcagtagtgttctacctcttcagtccttatgtgaccgtttcttttggcttacaaacttgtaaagcagtactacttttgctattactactgcagtactacttgtgtttgtctcgtctacatagttcttttcattcatatggtgctagaacaacttatgctcacgacaacacactttcggcgcttcacggtagtgtcagatccagtagcgcgcacagtccacaacagcacacatgaaaagcggcagctcgagttgtcactatcaactttcggcgctgcctgttgacataaagtgaatcacgcccacgcgtgatcgtcttgtcacatctaatgaataatgtatctcattgagttcacatatattgcagtgaaaacgacgctatataattgacaatctgaaggcaacctctttatatcttctttcccactagcacacaacacacgaaaatggaagcgccattccttgagcgtctcaactggcgaagcgatccttttgctggttggtttccaccatggtgtgaccgtcctttgtgcgattgtggggatggatgcatactcaagtcttccctcatgatacaaactcggggcaggagattcttccaatgcgcgaactttgatcaggtatgcttcatctattcgaagttcaaatggataaaaaaactaacttcttcgtacacaattgtaacatcttacgcagacatatcgtccaatgtgcaacttcatcgagtgggtagacatggagaacccacaaaacgacggaacccgtgcttacccacgtagtgaaacaagatcggactacctaaggtggaaggatgagcatgaacgtcgaattgctgctgaggctttagaatggcacgtaaatcccctaggactccccacgtggcgtgagcgtccggagtgtcgttgtggtgaccgttgtcaggtcataaggtccgtaaggcaccgaactcgaggacaaaggtgtttcgtgtgtccaaatattgtcgacgatgatttcgtggtaattacaactattcttttcatcactcctcagtactatcattaacttaactatcccaaaatggatgtacataggaggatgtaaggaaatgtcaattcgtacaatggattgacacagtcagagttacttcaagtggcgggccgataacgcaacctgaaccgaccatacagttcattcatgcttggatggagtacgatcgggtggaaattgcaagcttagactggaggaacaatccattagggttacctaaatggtccgagcgtccaaagtgtgggtgcagagatcgctggcaggtggctacatcctttgctgaacaaacatttcgaaggagatattttgtctgccccaatgtagacaacgatttcgttgtatgtctaaccatttacaaaatccgctatgatttgcacaaaattactacccaaactgaataacattactatttttacagggcaatccaaggatgggtggatttactcgatggatcgacaatgtcactctatcatatcatggccagaagataacagagtcagaaacacaagtagagtatcaacgattgaaggaccacgagaatgcaatgcattctgaccgacctagaagatgccgataggttaccgcatgcttgattcgtcgggatcgacaaatttgtaccgtgtatcgatggcacttcttatctatcttatcattacaatgtttaattatggtggtgattttttgtatgcgtaagactaagggcctatttggattgctaccaaaaacatgccctaccaatattttggtaatttgaatagtacttgtgtttgatttcgattgaagcttattcattagtaatacgtaatctagatttgagattatgtagaacattcttcactacaattttacattttggcagcaaaccaaatatgatcaaatgcaattttaccttaccaaatatttggtagtgccaaaacttgcttatattttggcactaacaaaatatttgtacggtaacattccaaataggccctaaaaaataataaaattgtattttaccagtcttggagattttaatcttgtatagttttcaatataaaaagatttgataactattgatatttatacaaaaatataaagcaagtataaattcgccctcccccagagcggcaagggggccgcctgcaaaattccaggccccccgccgcccatttgcaggcggccccccgcacagtacaaaatcgccctagcggagggcggcaagggggccgcctgcaaatttcgttgacggccgtcgcccgagagcgaacggccgtctgccacgtcactttcgccgccctctgggatggcgatttttaaaaatcgccctcccagagggcggtaggcgaccacttctatcaattttcaaaatgaaaaattatttttgtaaaacttttaataaaaaaaattaaaaataaaaaaaattcccgccaccaccagtcctcgcctcctcacctccttcccttctcttagctcgaactggcgtacttatgccagcgcatcgtccccttctccctgacacgcaagcacgatgttgcatcctccccaatgggcgatggcaacttaaccgagcaatggttccccatctctgagatttgtttgtgtgtgtgattttttttttggatccgctgatttctttggtgatttgtttcgatctcctaaaatttcggtcataatcaagattgagagcgaattacttgcattggtcttcgtggtaattcagtctctatttttacatgactgaattcctgaaaagactgtagactgcgactgatgtcatcaatctaacttaatatatttaatttttaaatagtgggttagttgtgctacaccgctactccatccatcctgaagagcatggctaataatatagccaaatgcttgctggttttatagatctttacagtttaccgctcagccaactcgtatagtggttagctcttaactataaatatatagtctatatgtctctctcatatattttcttggtttctgtacctatgccggctataaatatatggccatccgcgcctctctctcatctcctctcttctctcatccatctatcatttagccttctcacaatcttctattagtacttgcttgtaacataccgaaaactaactattttctaatcctgcatcatgccgctttttatgttcttaataacttcctaaacctaggaaaatacaattagagggaccttctaaaactaacttgcataaaatctctttctggtatttaacttcttttgtgtttttcatttaaaaatatagttggttaaattaaggtgtttcttgatttggttttaatttaaaaaccttctttagactaagattcttttattcaaatttagtttgaaaactctttctatttttttatgaattatggtcaaagaaacattcccatactgtcctagaacctaaaacaaagtaattccaattttattataattaattgttagcccattctttgttcttaaacccatcctttgattctcgatccaaatgtccaaattcctccttttgatctagccaccaatttaattcctgtggcttgatttcctcttcggcacaagaatagtattattgtaaatattgtgaataattgctcttgtgctaagaaaatagcaatttatattcttcactcaactttccctattagccacaaataattcttcaaatacttctactatcaaatttaggattcaaatcctatttattttacctccaaccattctcctccaaacatatatatacattgaggaattatattgttaattcccctctcatttgagtgcattaaattccaccatattccacttccaaaaatattgcactcaaattagaaaatatctgttttggaaattagatccaaatataatttcctttcaaccttccctattcaaattatctccaaatatattttcctttcaaaatcttctattcaaatccctttcaaaattgagaaaccaattctacctaaattgggccgaaattctttttctccttcggcccaagccggcccaatacccagccgagccgccaacttgcaccgtgccgtgttcgtcctccgccgctgctgtgccttaccctcctcctccgccgttttctccttctctaagaaaccgtcgccgctgccctaccgtcgccgccaagtcgcgtcgatgctgtgccgtgttcctccttccccgccgcccaactccctggcagccgacgtgtgtgcgcgccgccgtcgacatccaatcggagcacagagccgacgccgtcgttttcttttccacggcgccgtcacgaagttttccttgatcttcccctctggaaccgccttgcgccaccgccttttgccgcctataagtattcggcgaggctgccccttttcccctccacaccatcgagctctccgagctccttctctctcctggccattaccggccaccaccatcattggctgatctccctcaccggagcaataccggccaataactcgcgccatcgagatttcctcgattagaggattccatttttccccttccccccttcctccacctctgaatcaaacctcaccgaagctctctctctcctcccagttcacgaccttgcatccgccgttccggccatttccctcactccctttgcaggacactgcccttcctaggtgcgctgcactcgggaacaccaccggccgccggcgtcgttgccttccggccactggagctctggcgcccctcctctccctcctgtcagtttgctcggcagtagaaggaagaggaggaagacgacgggaggaagaagaaaaggaaaaagaaaagaaggcagacactgacaggtgggcccctgcacagtaactcttcgtattttctctatttaattcaaatcctaatctttagaagcccatatctcctaaaccgtagatccgattccattcaaacttggacctaaattcatataaattcaaaatctatattttgataccaaatttgctattttaagattctgtttgaatttccttaatttattcaaatactattagaataaatatttgattaaatcttacaattgaatttacaacttaaatttatatttgcttttcaaatattttattttattccaaattacccctttagccactaaaaagccgccggttggaactttacgccttccatggggatgttcgcggtttactatcctcgacgtcggaccgttggttgtaaagcccgacaaaaaccaaacctaaggtcgaagtgctgctcctagcaccccacgccttgatgcgtatagcggtcggagcttcactattccctcgacctccacagcacgccgcacagttagctctcgggctcttttgatcttagccgctccgccgccactcacggttgtcggagtaacacttccgccccaccaaacctacaccaacctcatattcctctagccgatatactgtcggtcgacaccggctagagaagacactaaatctagtcattatgctgccaactctagcaacgactagcaaacaaccaaaccctagccgataccttgctagtcaaatcccagttgtcatccaaattccatactgtcacgccccgaactagtaccgaccggaactagcccgcgacgctccaaattaacctgttaattgataccagtcccaggaaacagtgctggtatcacaggaagacagattatcacagcaacagaggtctctttattatagagtagaggtacagtcatgttgggccgcggacagatcccgagctcacaactgcattacaaaagggaagcggaagccaggacttggaccaaacaacacaggcgcgacttgggaactaggccgaaaccctaaaactcatcgtagccggcttgctcctggaagaactcctcatcagcaggatccgcttcatcttcttcagcaactgggggggattatttatatagagcaagggtgagtacgggagtactcagcaagccatgggaaataagtgtttaatgcaggctacaaagaaagggctgctgtttttgcaattgattttatttgaactcttttctgaaaacaactaagtgagtgcttctcaaacgacacggatgagacagtgcgtctcgtccggtcggagtatgtgcaatgtatcagtctttagaattggccaagattggtacccggccaacatctttcaaacggccaaccgggccaacaactttcaaacggccacccgggcctagctgatcccatcagctgtagatttctcaaacatcgatcccctttttcacaacggcaatttcacaaggcagtagtcaaacaaaactacgctaggaatcacctcacatccgcccatgaccgtgggcacggctgttcgaacagtttgttaacctctgcagagggggtacactttacccacacgacattactaacccggatcacccagcccgtggggatcagccacgtcgggagacctccaagctttcatgacaaggcatttcgaaagccgacacaggtttaccatatgccgacgagaggggtcccagaccaacaacaggttaggtcccagaccatactgtgccaggaagcccaggggtcctccccgacaccaccccggcgaatccacatgtttctcggcatcaaggctcccctgataagctagttactcagccaggggtgtcccattccacccatgtggtcgtacttgtcttatgttcggatgaaaatccaaggaaacggtccttaagtgcaagagcggaaaaccgtacacccggtacgttccccggtccgcggttttggaaattcatttagttcgcaagcaccgacccaggtgtcgggttttccaagtcttttgtaaaacccaagttttacccaagttgtttttcaaattttaagtttgaaggcgaccgtcgatactcgcacagagtgcacgaatatcgaggcgcaactagatggttacaagggaacatggtataacaattaacaaaggaaggatcaaatgcaacaaactaggtaggtccgccaatctgccttgtagacgggacaaacagattaagtgcgatcctatcaatgcataatatttttcaagcaacataattaacttcaaatataggctcaagatgttcaaaggtggcttgccttgctcgagatcttgggcttgatcctcgaaatcctcgcactgcgggtcttcgggctccgaaactacacgcgaaacgggacaactcaacaaacggcgaaaataaagccctattaatgacctctaagcgtgccattagatagatctcgagatttgaggaattttggaagttgaacggagtcaaacggatttacggttgggaagatattgaatttctaagattattggatttttggtctaaaggaaaagaatttaattaaatcctttttgaaaaagaaaagaagagggggagggaaattagacttttcctcgggcggctagggcgcggcccgagagaaaaggggcggctcagccgagctaaatgggccggccggcccaaggcggcccaagcacgcgcgcgcgggaggggaggagagagagagccggtggaccgggctcacctcgtgtggtcccgggtgggacccgcttgtcggtgacacggttcaccgtgcggagcgagcacgcggcgcacgcgcgctggcgggggagggacgcggtgcacgcgcgcggttcgcggtggaacggatgcggcgggcccacgcgcagcctcacggcttgcggtggaacgcgcgcacggggaggggctgaccggggtcgactcgacccggccttggccgagttggcgccgacgcggcgcctacgtggctgccacgcgggccggcgggaggtagacgacgacgccggccggaacggacggcggacgacagcggcgagcggcggagcgaaccacggcgatacaggcgaaagcgagcacaccgggtggttgcacgagacgaggggagacgagccaacggctcggattcgccggagggagcttgacggcggcgaatcgcggcggcggcaaccggcggcgggagaaggggaaaacggcgacgaggtcatgaggggccgattcccggcggcgagagcacctacgcggctacgggaatccgatgctagcgttggattaggaggaaacgcatcgggggaggccggcgacgagaggcgcttccgagctcgggcggcgacggcggcgagcacatggcgagcggcggcaacggtcggggcggcgccggctagctacggggaggctactcatgctactacccgagtctaaggggaggagatggagcgaggagggagaacggggagatgcactaccgtgcgggcgaggcgcagtgacgagaggctgacggcgcgggagtaatctctccggcctcgggccggggaagaggaaggagagggcgcgcccggagtccccttccgcgtccttgctcgtgccggctcctccgacacgcgcaacgacgaacggcgacggcgaacagagcacgggaggcggcggcaatggcgtggaggcgaatgggagaggaaaggaaagggggaggcttgggtttataggatggcaatgtcggtttgggaaccgacttagggcgggcaaaggagagggctagcgctcggcggtcgcggccaaagcggcgacagggaggagggaggaggatgacgccggcgggaggaaaaaggggaaaagagggagaggaaagagggcttgtcccttgcctcttcgggaaaaggacgagggagcggaggcgacgcggcagagggaggaggagctctgcctctgtcctttggcagcttgcgcgcggagtggcggggccgagacgatgacgacggcgatgacggcggggcggtgtggagcggagcggcgacacgggcgacaggcgcgggcaggcgcggcagaggctgacggcggcggcgaccaggcggtcggccaccacggcacgcgcgcgcggaaagcaacgggcggcgctgcggtttgagcggcgcggctcgggcacgcgcgctggcttgcggggccgagcagctgcgcggctgcaggtgcggcagggcagcggggccgggtgacgcggacggcgcaggcgcggcacgggcggcaaccacgcgggcgcgcgcgcgaacaacggcgcgcgggggccgacttcgcgggcggggagctcgccagggatggagacggggagagggagagcgagggggaggcgctcggcgcggcgcagctcacgcgcacgcgcgcgcggcgcgcgggcggagcggaagagggagggagagagagagagagatagccggggagggagggggagatgggccgagagagattcggcccatcgaacccgggggaggcaaaatagacttttgcggaggaattgatttgggaagggtttggattcgggattgaactcgacgatagatcggggatttgagatctgagatggcacggacactagacaacaagcaaagaaacaaatttcgcaattagggtttttaagagataattttcctgctaggcgccacgacggaacgggcgctacagaccaacccccctaacaagaatctcgaccccgagattcagcacctaagggagcagctccgggaactcggcgcggagaagatcttcttgctcctaggttgcctcatcttcagaatggttgctccattggactttgtagaacttgatggtcttccttcgagtctgacgttctgcctcttcaagaaccttgatcggtctttccttgtaggtcagattcttttccagcacgatattacccaggggaacttgttcttctggaacacggagacatttctttaactgggatacgtggaacacgttgtgcacatctacgagaccttcaggtaactcaagctgataagccacttcgccacgtctggcggttatgaggtaggggccgatgtagcggggtgctaacttgccggacattccaaacctcctcataccacggaggggcgatacccgcaggtacacatgatctcctttttcgaactcaaggtcacgcctccgattgtcagcgtaattcttctgacggttctgcgctgtcttcaaacgttctcggatcagcttaacttgttcttctgctgccttgagtatgtcaggaccgaataccagtgcttcgcccacctcattccagcacaagggagtgcggcactttcttccgaacattgcctcattcggcgacatctgaatgctggcctgatagctgttgttgtatgagaactccgcatacggcaaacaacaatcccaagtgccttcgaaatccagggcgcacgcacgcaacatgtcttctaggatttggtttaccctttcggtctgaccatcggtctgcggatggtaggccgtactaaaatttagatcggttccgagggcttcatgcaactgcttccagaaccttgaggtgaactgagtgcctcggtctgacacaattttcttgggacagccaaatctacatacgacatgggtcatgtagagttctgctagtttctttccatcaaaggtggttttcactggcacgaaatgagctgatttcgtgagtcggtccacgattacccagatggagtcgtacccgctaggtgttcttggcaaaccggtgatgaaatccattccgatctcttcccatttccactcgggaatcggtaggggttgcagcagaccagctggcctctgatgctctgccttgactctttggcaaatgtcacacagggctacgtattctacgacatctcgcttcattccggcccactagaagtatgccttgatatcttggtacatcttcgtacttcctggatgaatggagtaggcggactcatgagcttcctttaggatgagatctcttaactccttcttggccggtacacagatgcgtggaccgcaccaaactgtgccttgatcgtctatggagaaatcggtgtctttcttctcttgtattctttttattaattcttttatcccttcgtcatctttctgagcctcccggatttgcgattctagggttggctgcaccgtcaagctggcagggacacctgactgtaccacggtcagcctcaacttctccaattctctgcacaggcggtcttggtcaggccgtatttgagctacattactgtaggccttgcgacttagcgcatcaccgaccacattagctttaccggggtggtcatgaattccaagatcgtaatccttgattagttccaaccatcttctttgcctcatatttaactcggtctgagtgaagatgtacttaagacttttgtgatcggtgtatacttcacatctgttcccgattaaatagtgcctctagatcttaagagcatgaaccacggctgccaactcgagatcatgggtgggataattgacttcatgaggcctgagctgcctggatgcataggccacaacctttcgttcttgcattaggacacatcctaagccttgtcttgatgcatcacagaagatctcgaaatcttttcggatatctagcaaggtgagaactggggcagtagtcaaccttttcttcattttttgaaagctgtcttcacaggctgcagaccattgaaatttattttccttctttaacagctcggtcataggtctggctagcttagagaatccttcaatgaatcttcgataatatccagctaagtcaaggaagctgcgaatctctgacacattcttgggtgggttccaagcaagtacagcttcaaccttgctgggatctacttcgacaccgttggaggagatcacgtgtccaagaaatgctactcggtctaaccagaattcgcatttcgagaatttagcgaatagttgatgatccctgagcttttccattatcagcctcaggtgttcagcatgttcttccttattcttggagtatatcaggatatcgtcgatgaacaccacgacaaactggtccaggtattccatgaagattttgttcattaagttcatgaagaatgctggagcattggtgagtccgaaggacatcactgtgaactcatatagaccataacgcgttgagaaagcggtcttcgggatatcttcagatctgattttcagttggtggtaacctgatctcaagtcaatttttgagaaaactcttgctcctttaagttgatcgaacaaatcgtcaatctgtggcaacgggtacttgttctttatagttacttcattcagggctctatagtcgattaccattctctcagagccatcctttttcttaaccagaagcactagggctccccaaggggatgagctaggtcgcacataactcttactctccaattcttcgatttgtcttttaacttctgctaactcattagctgccattcggtagggtctttttgcaattggtgcggtgcctggtgccagttctatggtgaactcaatctctcggtctggtggcatactcgttaattcttctggaaatacgtcgggatattcatagactatgggcaccgactccaaggaggtgacttgtaaacaggttaggatagaccgacttgcggtaggggtgttagaggtaaagcggacttgctttcctccaggtccttgcaaggtgatggacttttcggcacaatctatctgtcctttgtgcttagccaaccaatccatccctaggatgatgtccaagctttgcgagtctaggactatcggtttggctagaaagtcaacttcctcaattctaaggttaacttccgggcatatttgagtggcccttatattcctcccaggggaatgtactatcattggtacacgcaaattttgggttttccaaccatttcttttcacaaaagcttgtgatatgaaagaatggaaagctcctgaatcaaatagaactattgcgggtacggagttgacagagaacatacccatcacgacgtctggagcatcctgagcggtctcagcttgaatgtggttcacccggcctcgaccaaagttgttggaagcacgtgaaccttgtccacttgcctgagagctaggacgaggctgagctgccgctggagtaggagttctggcagtgctgccattagcatgccctgagttggtgttggtaggattctgagggcactgtctggcatagtgacccatctggttgcaccggaaacactgaactgctgacggtccctgcggtgacttgaaagaggtaacactgtttggcgcagtattgccactaggggcacgctgctgtggctgaggtgccggacggttcatctgaggacgaggggcgtagcctggctggcggttagcctgagtgaccgactggtgatattgcatgggttgaccgtagcgagggcgaggtgcgcctcgggaagaatttccctgatggttagacttgcgtttcttgtattcttcggtagcctcttttctggcatcttcaagtagaagtgccatgttgatcatatgttgaaaagtggggaagtcatgagcaagcaactggagtctcattccaacagcgatccctttcaagaatttcctgatcttcttcttgtctgtgtccacttcctcaggggcgtaccgagccaacttgttgaacatacttaggtactcattgacactgctgttgccttgcttaagtctgttgaattcctctttcttcatgtcaatagtgctttcaggcacatgagctacacggaaagccgtagcaaactcatcccaagcaatgttagtgggttcagggtgtgcattgcagtaattctcccaccaatctgcagcaggtcctcttagctggtgagaggcgtagagcgtcttctcaacaggagtacactgcactaagttgagttttctatcaacatctttcagccaatcgtcagcctcgacgggctcgacggtctgagagaactctggcggacgagacctcagaaaatctgtcagcttggatctattgttgctcatgtgagggtggccatttccatgcgcattatgctgaaaaccggctacggctgcggctaacccttgcaagatttgtgtctaaactgccattaagtgctgcatgttgttttccacatgaggtggggaagggaggcgttcttctccagaattgtgactagcagtgcggtgagagcggtgagactgttccatttctgcattacgggaagctgtgtgatgcgagcggttactgcgacggggttgctcaacttctgcgttgcgggaagcagtacggtgcgaacggttgctgtggtgagactgctcattagctgactcatgatttgcttctggctcaactctaccatcctcaaaaccaaagcgggctggtgcacgagcagcacggcgggggcggctaaccatctaaactcccagaagagggcggggtaagagtcagataagcacttaggagggcaaggagcaaagtaaatagcaactcagatagcacacactaggcataaactggatttttcatatcataaaaacacctagtacaacgggtgtagacaagtcacagagctacgccgagcttgactgtgcgcacaccacctaggagaaccagactaccaaacaatacccacaacaaacacacgcacgcactacctcgccacgactccaaaagagttggcggcggaacaaaagggcctaacacacggacggctgctgaagactgcctcctctactcctcgtctgcctggctgcttcctgtagtcggctcctcagtcgaagaaacgtcgatcggctgacgcgaagggaccggcggaacctgtcgagggccggcagcagcacgggccgctggcggtgggggagctgggtagtcgaaacggaacacggtggaagaaccaacaacacgcttccgcgcagtgcggataaagcgtgggcctcggcgggaggaagcaactggggtgtgtccgggggtgtaggaagggctaactgggtgtgggtagggagagtacactggtgagtatggcgcacgcgagctgggggagcgcgggccactgggagtgcgggcagagccgcgggagctgtgggaggacaggtggctggcgtggcagaggcggcctgagtcctaggagacagtgtcaactgaggtgacaccctcctcggccagacgggcctccaaagcagcgtagcggcgggcaagggagcggtaagcctcaaggagtaggtcgtgctgagtggcctgagcctccgaaagctcaaccatgcgagtcagcactggctgagactcgctgtaaggacaagggtacctggcgtctgcgtggccagaaggaaggcgtggaagctgccggaaggcagagcccccgagacggtggctgtagtcgtgggccaagcgacgaagcgcagtccaggagaggtcctggtacgcgatctggagagtgggcctggccacggtgaagtggtgtgggcgaaggccagctccgtgtatacctccacgagggtaaaggtacacagagagctcacaacgagggggaacacggtccacggagtaccccgtgtactccggacacgagaagccaacaaagcgggcgaggtcacgaagctgagcaacgtggtgaccctcaccaaaaccgtgggaactgaagctggcgttcactgccatctacaattttgaaagagggagaaagatcagtaaccattttagaaacaaactattgaaaataaggaaaccaaaagaagccttagcttttcgcaagtagttttgaacttagtatccttagggtcgtcctaaacgtcgggtttcgccctagggccaagcctgtgctctgataccatctcttgtcacgccccgaactagtaccgaccggaactagcccgcgacgctccaaattaacctgttagttgataccagtcccaagaaacagtgctggtatcacaggaagacagattatcacagcaacagaggtctctttattatagagtagaggtacagtcatgttgggctgcggacagatcccgagctcacaactgcattacaaaagggaagcggaagccaggacttggaccaaacaacacaggcgcgacttgggaactaggccgaaaccctaaaactcatcgtagccggcttgctcctggaagaactcctcatcagcaggatccacttcatcttcttcagcaactgggggggattatttatatagagcaagggtgagtacaggagtactcagcaagccatgggaaataagtgtttaatgcaggctacaaagaaagggctgctgtttttgcaattgattttatttgaactcttttctgaaaacaacttagtgagtgcttctcaaacgacacggatgagacagtgcgtctcgtccggtcggagtatgtgcaatgtatcagtctttagaattggccaagattggcacccggccaacatctttcaaacggccaaccgggccaacaactttcaaacggccacccgggcctagctgatcccatcagctgcagatttctcaaacatcgatcccctttttcacaacggcaatttcacaaggcagtagtcaaacaaaactatgctaggaatcacctcacatccgcccatgaccgtgggcacgactgttcgaacagtttgttaacctctgcagagggggtacactttacccacacgacattactaacccggatcacccagcccgtggggatcagccacgtctggagacctccaagctttcatgacaaggcatttcgaaagccgacacaggtttaccatatgccgacgagaggggtcccagaccaacaacaggttaggtcccagaccatactgtgccaggaagcccaggggtcctccccgacaccaccccggcgaatccacatgtctctcggcatcaaggctcccctgataagctagttactcagccaggggtgtcccattccacccatgtggtcgtacttgtcttatgttcggatgaaaatccaaggaaacggtccttaagtgcaagagcggaaaaccgtacacccggtacgttccccggtccgcggttttggaaattcatttagttcgcaagcaccgacccaggtgtcgggttttccaagtcttttgtaaaacccaagttttacccaagttgtttttcaaattttaagtttgaaggcgaccgtcgatactcgcacagagtgcacgaatatcgaggcgcaactagatggttacaagggaacatggtataacaattaacaaaggaaggatcaaatgcaacaaactaggtaggtctgccaatctgccttgcagacgggacaaacagattaagtgcgatcctatcaatgcataatatttttcaagcaacataattaagttcaaaggtggcttgccttgctcgagatcttgggcttgatcctcgaaatcctcgcactgcgggtcttcgggctccgaaactacactcgaaacgggacaactcaacaaacggcgaaaataaagccctattaatgacctctaagcgtgccattagatagatctcgagatttgaggaattttggaagttgaacggagtcaaacggatttacggttgggaagatattgaatttctaagattattggatttttggtctaaaggaaaaggatttaattaaatcctttttgaaaaagaaaagaagagggggagggaaattagacttttcctcgggcggctagggcgtggcccgagagaaaaggggcggctcagccgagctaaatgggccggccggcccaaggcggcccaagcacgcgcgcgcgggaggggaggagagagagagccggtggaccgggctcacctcgcgtggtcccgggtgggacccgcttgtcggtgacacggttcaccgtgcggagcgagcacgcggcgcacgcgcgcgggcgggggagggacgcggtgcacgcgcgcggttcgcggtggaacggatgcggcgggcccacgcgcagcctcacggcttgcggtggaacgcgcgcacggggaggggctgaccggggtcgacttgacccggccttggccgagctggcgccgacgtggcgcctacgtggctgccacgcgggccggcaggaggtagacgacgacgccggccggaacggacggcggacgacagcggcgagcggcggagcgaaccacgacgatacaggcgaaagcgagcacaccgggtggttgcacgagacgaggggagacgagccaacggctcggattcaccggagggagcttgacggcggcgaatcgcggcggcggcaaacggcggcgggagaaggggaaaacggcgacgaggtcacgaggggccgattcccggcggcgagagcacctatgcggctacgggaatccgatgctagcgttggattaggaggaaacgcatcgggggaggccggcgacgagaggcgcttccgagctcgggcggcgacggtggcgagcacatggcgagcggcgacaacggtcggggcggcgccggctagctacggggaggctactcgtgctactacccgagtctaaggggaggagatggagcgaggagggagaacggggagatgcactaccgtgcgggcgaggcgcagtgacgagaggccgacggcgcgggagtaatctctccggcctcgggccgaggaagaggaaggagagggcgtgcccggagtccccttccgcgtccttgctcgtgccggctcctccgacacgcgcaacgacgaacggcgacggcgaacagagcacgggaggcggcggcaatggcgtggaggcgaatgggagaggaaaggaaagggggaggcttgggtttataggatggcaatgtcggtttgggaaccaacttagggcggtcaaaggagagggctagcgctcggcggtcgcggccaaaacggcgatagggaggagggaggaggatgacgccggcgggaggaaaaaggggaaaagagggagaggaaagagggcttgtcccttgcctcttcgagaaaaggaggagggagcgggggcgacgcggcagagggaggaggagctctgcctccgtcctttggcagcttgcgcgcggagtggcggggccgaggcgatgacgacggcgatgacggcgggacggtgtggagcggagcggcgacacgggcgacaggcgcgggcaggcgcggcagaggctgacggcggcggcgaccaggcggtcggccaccacggcacgcgcgcgcgggaagcaacgggcggcgcggcggtttgagcggcgtggctcgggcacgcgcgctggcttgcggggccgagcggctgcgcggctgcagacgcggcagggcagcggggccgggtgacgcggacggcgcaggcgcggcacgggcggcaaccacgcgggcgcgcgcgcgaacaacggcgcgcgggggccgacttcgcgggcggggagctcgccagggatggaggcggggagagggagagcgagggggaggcgcccggcgcggcgcggctcacgcgcacgcgcgcgcggcgcgcgggcggagcggaggagggagggagagagagagagagagatagccggggagggagggggagatgggccgagagatattcggcccatcgaacccggggaggcaaaatagacttttgcggaggaattgatttgggaagggtttggattcgggattgaactcgacgatagatcggggatttgagatctgagatggcacggacactagacaacaagcaaagaaacaaatttcgcaattatggtttttaagagataattttcccgctaggcgccacgacggaacgggcgctacacataccctctacaatactatctatccaccatactcttagccacctactttctgtctaccagaacctacacataaaatatagagtctagccgatatgctacccaaaaatactaaaccctaggtatgatcctaccaaaacctaccatcagccgatacttgctatatatctgttcaactagttcaatcatccagtatacttcccatcctcctactaatcaaacccacacatgaaatataagcaagagtagttgcttaatcccctctagcctccaaccctctagaacctccgcataaaatatcaacacagtaatccatataccctataaaagagatagactataccctaaaccttagcccacataaccgtttatctctttcttactattttatggattttattgaaattggttcttcatctttcttagtagagtctattttattttggatggtaacctgtggtatttcgaggatcggataatcaggttgcctatctcggatttatttgcgttggagcaaggcaagttattattccttccctttgagcataaataccctacattctatattatattctatacactagccatacatgattttgaatgcataatctgaacatatagcgaaccagttatatgctagcttttgcttagccatgcttagttagaatatgcataaaatttaatgaacttagattgggacaatacgtaagatttggttgatttctgggtggctagtactgtcccggtcgatataattgccaccaaatacttatgtcaaacgaacgagtacgaccgtagcttctagaatggggacagacctagatattatgttaattaacaatgtggtacctctgtacagtggttccttttgtaagtcctcgcgcaggaggcaatcttatgccgagcagggcatcttatgatatttaccgaggcgcaggtaaatatattgattttcgctcatgatctgtgtgtgtgattttatggaaacctggttgagatgacgtggggtctctcatccagttctctctaaaaaccccgggaacgccagaactcctctcgctgctgataacgttacgttcagagcgcatggggactagagttcatggaacaggtgccactattgttaataacctaatattgtgccatgactaagctaatgaatattggcaagtcgtggactatgggtaaagcgtacatctactgcagtagaatattcatgaaactattcgaatagccgtgctcatggaattgagtaccgagactcatatggtatttggttagaaacttaattccagattttattaaatactgttgcatcaaacgcattgcaggatttctcctcctatattctctgctttctgcaagtaatcatagccctactcaaatactactaattcatacattcatattgaatataatagcttgctgagtacgttgtactcacccttgcttcaagccccacctttttcagagtccatttggagttcttatcgaagccgggagttcaatcacagaagttagttccctttaaacctagtcttgaagtctagtattgttagatggtttaattctatagcaaaacgacagagttgagtcatcatatagcttctgctgtattagttagccacaagtttgtaaatactcatatattttgtaataacatctcctctggagtcttgatcaaacgtatgcaatgaagatccagattgttgaacctgtatcaatctactgattcagggcttgatatagtctaaatatgtcggttaccgaatcattagttttgggacccgtcacacgtcgacagctattagtaccaactaatagtcgctgctccaatagtttaaccacgtgatacgcgcgcgatgaacttgcacattggaatacttcaaactagctaggattaacgcttcctctgtgtttggcgctggcgtggccaccagcgcgtgtcgacgcgtcagtgaggcgctagatggcgggtagttttcgtgagctctcctgcgtccgtgtactcacttggcgattttgcaaaaacgtccttgatttacctgataatttgttataggtccttagttctaacttttgcgtgcttacttacaggtcctctgtagaaaacaatattatatacgaagaagcgaaaaattggaaaatcgaaccgtgctctgaaaactagaagattaagagtgtttttgcaaaacaaaaacaaccctaacccccttcctcgaaccctagccgccaccattcatttgcctcctctccttctctcgctccgctctatctcctgcccaagcaatggccgccaccgcgtgccgcctccctcattctcttcttcccgcaagtgatgacctcccccgcgcactctctgctgccgtgcctgccgccgcccagcacgcgggccattgccgtcaccatcctctcgcttccgccgccgcatccgccaacgaggaggccgggaccgccggatccggtgacttcggcctcttcgctggcagatctggccactctaaggcgaggggaagccgacagccgccctctacgcccggtaccgcccctctctccctctcctctccatcctcttcatttccggatcggtggacgccggcgattaggcggcctagggttcatggtcaacaacagtggttgatccagtggctactttcccgatcgctcccctctctcctgtggcagcggcagtcacgattcgcgagattcctcatcccgcaccgtgcgctgatgatccctcttcgcctcctttcaccaatccgcggcaatggcacaatcgttgtcatcttcacgtgctcttcctccgttgcaatttgagacagagaggaattgcaatccctgacctggagcttttttggccatagatgtgaggatgaaagaaagagatgaagggggatgaacagagcaattgcaatcttctaccctcttgcttttcccatgcctcttgctgtttgtggctgcaatggtgagtactgaatctggtgttgacagtccttaaatcataatatctaaccgccaatatctgcatataatgaaataaaatatggtatctgtcgacgggggatatctgtagaccggataaatagggtattggagtacgttggtacaaggttctacacgatacgacatcataacgtataaaagataaggattatactggtttagccccctcgtgaagtaatagccctaatccagtttatatgggattgatatggaaaaccatagaatacaaagagaacagatggatccgacaataccggcgagatccttgtcgagatgattcaacgagatctcccgacggctttggctggcgtcctctggcttcatagactatggtgggtgtgctggcgctatgattcgatgatcatgaactcctcaaggggtatgccttttatactgtgaattgccttagtcttcaagtagaacccggagacaacaaaccctccacgatatagaattatccctatcttttccgagtaggattctgatagttactagcctgtaagggtattttccgtaatattttatatatttccttatcgcatacggaaacaaatcataagatatggggtataccaatccagtatacttggttaatcataggataggatgtatgtctcatccgtaaccctgacagtatccaacttagtggtagagattattactaatcaatttcactagtgttaatgaaatatgtgtatgtgggtattttaaggagaaaacacacccatcatgtgaggaaacacacctccgaccaattaggcgcgagtacacggatggaaggacccataagtcaggtgaaatcgtcatgaaatgagttataactgtcttaaccgtaatcaggacccactatatcaggagttcaggacccactatattatagaacttgctccaatgcaaagacctcgggctccacaggcacggaccatatgaaggggagaaaaacatgacaacccaactaacgatacggatggacgatcctcggttcctcaccacacatcctacctaacaaactcgagggaaagaaaaagtagtacagtactagtgcatatttattttagaacagactgaatcatcaacggaccagggaagcatggccttgaagcttctctggctgcatgccgacggacactgccagtgccacctctctctgctgctgcgcctcgtcgcttgcctcgcccttgtgctgctgctgccgccgccgccgcctgcccaagcggcgacggtggtcacccacctgccgggattcgatggtcctctacccttctacctggagaccgggtaagtgaactgaacaccctcacacaccaaagaatgctcattgctctgcttctttgcagaggcgtactctgagcctgaatctctgatcgattcaagagatcacatgaaactgcaggtacgtgggcgtggaggaggagaccgggacggagctcttctactacttcgtggagtcggagcggagccctcgcagcgacgtcgtgctgctgtggctgtcgggagggccgcggtgctcggtcttcagcggcttcgtgtacgaaataggttcgtagcccgtgcattcgcaactcggacatcatcgatgtattcgcaggttgcaattgggagaggcgactgggataatggggttcatgatgagcagtgccatgtttttttttttctcaggccctgtaatgtttgtcgcggaacgttacagcggcggcacggttccgcggttggagtataatccgtattcctggacgaaggtgagagcaaaatatttgtatatcagcactgatatagaagcgaattagtctataagtaggtctgtgtatatcaatacattttattttacccaattaagtctatagatgggttcatatattaacccacttacactcagtcatcaatttttctgctgaatatatatgtgggagagctacatatacataattatgtttatgagaaatttatttaactgtctttgatgctgctccatttggtttgtggttgattggacatttctagttggcaagcattctcttcgtggactcgcccgttggttccggtttttcatatgcgcacgatcccaaaggttatgatgttggagacatatcatcttctatgcaaattgtgaaatttctacgaaaggttgagacaaagcaagctagcgtctactataaacttccattaataaaaaatgttgagattttgtctctttatgcagtggctggatgatcatccaaagtacctttccaatccgttctatattggaggggattcatacgccggaaaggtggttcctcttatcacgcagtatctctctgaaggtaaatccatgtgttttctcttcgtgatgctagcaagcgacatattttaaaattagtatctccattctcaaatatatatgatgccagaatgcacatagacaaacatcaaaatcttaaatcattcataaatgcaaaaaggatttatacgtcttcaacttctgaccttccgtgagacagcgccgcagatccgtgtctcaccacatggccccctttgctaggagtacacatgagatgacatgggatgaagagtcgaagatgtagtggatcagggccatgctgtttacagggaaacctctcattggggtgggctagtcggtgttggggaataatcctattattaggttgttatcttaactaatgtaatttagatgactaaaatacccttgaggaaatgtcacttacatataacgaaccaagggcaataacgtaacttgtcgttgctctctcccccgttccatgcattttctcactaccatctatcctctcctcaactcctcttctacccggtattcaagcttgggctccttccaatggaggcgggagcccttgccctgcatattggattttatagtccaacagtcgggaacctacatgtacatagatagggatgcaatagagaccccctggatctttcacagctaacactaagtagggtttactattttggttcgtaaatttctatcggggggatcaggaatttcggaatggaatgattcaacatttgatcaaattccaaatttgaataaatttgctaagttcacaaaaataaataaattttaatgttttttgaactttttctatccggtggaaatagtttcatgccatggcccatgggttgccctagaaaccgtgttggaggccatgcagaggatgtccacatagactggtcggggagggtttacaagtttaggatggaggcggttaattaaggaggctaacggttagaatgagaagatgagagtgcctgtcaccgaagtaagtgtggataagtgactttctgaaggtgagtggctaggagcacgattgactagactatcagatgaaattagagaaaatacatatatcaatagagaatgagtaattttgaccatttacgtggtttaaaaaaaccatttgtagtgagttacgttgacaaattgatatgtaagttaaaagatagttgcagggcttacaatcacggcttaattattattttataagagcataaagatttatgttcttgagctcttaattatagttttgtatgtgattcattaatgacaattgtattgtgcttcaggaattgaagaaatgcgtcatccaatcattaatttaaaggttgtattttctagtgtgcagataatcacttagatgacaaaatagaaattatatatgtatctagcttgttaactcttgttgcttttattcagggttatctagtcggcaatcctagtgcaggagataagattgatgtgaactctagggttccatactctcattcatttggagtgatatctgaccaattgtatgaggtaatcttatatttttttactgaagtgtagcccactaaaatcctaacgatgtaatgtcagtgaagatacttattcttttccccttctatttatcaaaaggctgccctggcaaattgtaaaggggattatgaaaacccaacgaacaaaccatgcactgacgtaatgcagaccattaacaatgtaagctttgacatctatatatatctatatatatatatatatatatatatatatatatatatatatatatatatatattgcccttattgtctgaacttaccgtctagctagctttgtcatctatatatataccttctccacagctcatgtcagaagtattggaaccagcatgtccctttgactggccatggccaatgccaggaagagatgcttccaataggaagtctctaaccgaggagcactattggttaggtgacccacctgttgaacctcctttcagttgttttgctgtaagtcactatttattgtgttttggatttttaatttcttgcaaatgtaattcgaatgaggagaaagcacctacatttccattgagttttctttacaaacgattgccaaattttgcttttaggcataccgatactacctgtcttacttctgggcaaacgacaatgccaccagagctgctctcgggataaaggaggtaaacttccttatctcttggtcgtgagccttttactattctctctttgtcaaaaattactaactttgactagcaatttttaaaaatttatatagtttaacaacataatactatgtttccagattcaccatgagaaatgttttcagaatatatagttcatatgttgctaaactattattgattttttataaattgatagtcaaaattagaaatgtttaacttagaacaaaattaaagcgataaataatttaaaacggaggggctaattaatctacaagtcaataataaatcaccttccaaatagggaacggtgacggaatggataaggtgccctacgggtcttccttacacacgtgatcttccaagcagcatagaatgccatttcaacgtcaccaccaggggttaccgtgctcttgtgtacaggttcaattagcataatcaatattttcagcaggctcatttcttatttacatattgttttgaatcttcctgatcgcttacgcttaatgctctgtaaaaaaaaaaaaacttatgtgggtgcagcggagaccacgaccctattgtgccattctcaggcacgcaggcatggataagatcattaaacttttccattgttgatgattggagagcatggcaccttgatggccaggctgcagggttaagtgattttcctatcgtcttgcatccccatctggtcttatctctgaaaacaatcgattgcatcatcatttattagtcactttcatttttaatatgaacgaaattagacataaaattgacactatgtttaacaaaatatgaagatgaaaaaagagaatgggaaaaaaatagtacttcttacaattggtagcttagtttgctaaaatttcttcttgacctgattagaggtgaatgttgttttcttacaccagattcacaatcaagtatgctaacaacctgacctttgcgacaataaaggtttgtctcgttctctaccccttcgttgggtccattcaccatttttgttcatacattaaatggagaattagatgtcactggtattcatgcctaacacaagactatttggttgttttcctatggatgtagggtggttgccatattcctcccgaaaatcggcccaaggaatccttcattatggcaaaacggtggctggctggtggacccctctaatgtgccgtcgcgcacaatacggcatctctgaattcagattccgatcatcatcaacatatgtaatgtgctcattatattgagtaaatcaatataactagctggatggcccgtgcaattgcgcggctagcacccaaacaaaattatatattttttatatgattttacttaaaatttattagatagctatcttattatcttaagactttgaaagaccaacccttatcatctcgtgtttctaattatatagtttttaaaagtcacaccagttgctaccccttatgtcatctccttctttatttgcttgcttgatctaccactatttctttttattcttcttgaaacctttaaaaattggattttatagtttttagagtttagtgtcatgttgggtttcatttttataatttctagatgtcttgtcaaacgttgtcattatactcctctacggcccgtctaatgtctcttctctttattgtcattgagattttaaaaatcgaacataattattgtctgggttcaattttactttcaagaagtctcgccaaaatgtctatggctttgccattgtactcctctatagctcgcccgcagcattccttctttattgtcattgagattttaaaatcgaacatgattattagtgttttttttttactttttagaagtttcgaacctttaaaaattggacttgtagttccattttttatattttttagaagtcccatcaaacgatgccactatgcccctctatagcccgtccgccgtctattctttattgtcattatgattctaaaaatcgaacataaatatcgttggaattcattttttattttctagaagtcccgtcagccgtcggcggctctgcaagtatactcttatgcaccccgcccgctgcttctcctttttattgtcattgagatttaaaaatcgaatatgattatcaatggggtttgttttttttttctttctagacgtcccggcaaccgccttactcgtttgcttcacggcctgcttgacgtccctccttttaatcgtcattaggattctatttggtgttttattaacaatttttatatgtcgtatcaaccgccaccactctactcttttataggcatgttatttaatttatctcgttatgtgttttagatggttttttatttcaataatctttatttttatcaaaaaatttagttatttataaattgtattactaattgaaatcttttttttctttttctaatttcagatttttttaaaaaaaatagttattaccgtattgtgttcttttaatgtttttattttttattttcaatttcagttgtttcaaaattgtattcctacttgaactctcttttaaattttctaattttggatattattttattttttattctaaattttaattaatctcgtattgggtttttatatggattcttctttcaatattgcttatttttaatttcgaatttcagctaattttaaattgtatttctacttgaactcttcttttattttcttttgctaatttcggatttatttatttttattccaaatttttattaatctcatattgagctcttatatgcactcttcttttaatattccttattaatctcatattttttattaatctcatactgtgtctatatgaattattcttctaatatttcttatttttttattcctaatttcagttgttcgtaaaatgtatttttacttgaactcttatatttgatttttctagtttctaaatctattttattttttattacggatttcaattaatctttaattgtgttctacatgaactcttctttcattttttattgtgttattatttcaaaatcaaataaaaatccgtgcacatgccatcatgcttttctggttgctgacgtgtgcatcacccaaatacggctcactgtgcagccgcacggcttgacccgctgcttcggatttccgtcgctcgccgctagcatctatcttcatatcaacaaaaacgcatccaaattacggttctacagtggttcgttgcccgctgctttatttatatatgtgtattatagcctaattcatctctaactctagttaattggtttaggaaatcggacaaaactcttttgagtctgtttgcatgtaaaggccctagctagagattgattctaattctacacgcgtacggtactccgtatctcttaattaacatgccaagtttgtcttaaatcttactttatatgtaaatttgcttggatcttgcgaggcacgggctgcagcaagcatacaaagaattgtactttaatcatacaaagaagaaacaactcccacggttagtttagcataggatgagctagatgttaatagataagaaagaaagttttatgaaccaaagtgccacgtagtaaaattaacaagtcaaaagtgaaaagtcaggataaagggtggtccaaaactgataaaaggtcacatgttgcactagggaaaaattaggcctaaactgtaatttactcaataatcattaatcgaggtggcacaataacgatgtcacgtgtttattcttcgctagattagagattgagttataggtaaaacaaaatgcatcttaaatcaaaatcacaataacgatatcacgtgtttattcttcgctagatatattagagaatgagttctaggtaaaacaaaatgcatcttaaatcaaattcactattagtcggtcaaatgttaacaccataatcacatttgtcccttgcagaaaggatgattttttttgttagtgctatccacctattaaaaagctccattaggagttagctagacaataatttgcaacttatcgtgttgacaacttgacatgcatacctttcatgtactggcctctttagcacaagatacaacaacctaaccgaaccagcatctagcgactagcgtcggggaaagaaggatcagatcagttgtttcagcttaatttagacgctaagaagagaaacctaacacatttgatggcggttagttgcatgcaggcacatggcttcattcatgggtcataaatgtaatcaagcattcaagcctatatatagttgtgtggcaagaatatatgggctgccgcggttgaaggaatagaaggccgaagagttggatctgcaatctgcaggccgcatgaaagtgggaagggaaaaagtacaccaaaggttcctcaactttgtcatcgagttacaaaatcatcctctaaccgcaaaatcggatatccggcgtcccttaactaatcaaaaccagtcacaatagctccttcgatggttttgaccccggttttattctacgtggcggctgagtcagcgtggacccacgtggtcatctctttttttcccttttcttctcttttctcttttattttcttcacttctcttgtcttcttcagcgcgtaagcgacggggccaagacgggcgcgcgggcgaagcaggcagagatgcgcggccgaagcggagcaaggggcgggcgccgctggagttgggcggcgacggggcgccagcagcagccgccgccacgctcacctgccgccaccgcgctcgcccgccaccaccgcgctcgcccgccgcccctgcctgcttcgcccgccgcacgctcgctcgacagggcggcgatggctttatggagacgtgacggcagcaggacggaatgtgagggaggccccgagcgagacggtgttcacggactccgtcgacgggagcagctccagctctgacgccgcatccaccgacgagtggccggtgacgatgtcgccgcccaggcgcccatgaagacggtaggcagcgccgctgcgggttcatcagccactgcgtccttctgcaactggcgtccctagaaacgacgctggcgaggctcgaccgacaatcgatccaagcgagaatatcttgagctgaaggaatggccacccgaaccgtccacgtgggaatggctccggaacggtggggacgtagagcgtgagctcctcggtgaggttggacaggctagtcatctcgttgacggcgtcgccggatttcctcgggtagctcagcagcgaattggcaatgacagtgccgtagttgaaccgcttcgctggaggaactcgccgaccagctagaccttggtgtagcggacgccaagctcagctgctcaccgccggagacgccgaaccagctccacaactcgatggggtgcaccgtccattggaatgtcagcggcggaaagcggcgctgccgccatcgccgtggggtgatctggcccatcatgatgctgccgtggtgccggagaaggtggtatgtgttaaataaatgaacttatgtcagttgggatttgatcttgccttgatcttatactcttatttactttctgttagtttgttagctattttccctcctcccatggttttctgctcgctctgttttgagtcagcgtgaccgcgatttgttcggtcaagtagtggagcttgacgagcgggagagtatcgagctgagaaaatgaacagcaccatgaactagcgtcggtgagcaccacctcccttctgctcgagctcggttgagggctgggagcttgaccttcgtgcccaccgcccaccgccggccgccgtcgcgccgccgtcctcctcctctcccgcctcgccctgtcgatgcccgcgtcgttcgcgccttccagccgcccgcgacgcctgcacacgcctgcgcctccctgtcgacgcccgcgcaaggtcgctgcacgcccgcgtcgtggagctccgccgggctgccgtcgggcatccccactgtggccgccgccggcggccgccatcgcggcgccgcgctcctccttttccccctcgctccgccaaccgacctacaggtgcagagagagaggaggaaccgaggaagagaagaaggggaagatagatgactcagcctgacatggctgaatcagccgccacgtaggataaaaccggtgtcaaaaccaccaaaggacctattgtggccggtttttattagttaagggacgctagatatctggttttatggttggaggacgattttgtaactccatgacaagttgggggaccttcggtgtactttttccaagtgggaagtggctctgggcttttggatttgtctatgtatgcagccattgggctctactatgcttatacgagtgcgatgaggcctgatgtgcttactctaagaataagttcactttgactaccttaactagtcactgtgtcgaccccaactattaaaatcgatgttatttgactccctcgatgattttgaaaggccgtttcgctatcgtggcaactacgtggtggtgtagacattgtctttgtcctacgtggcgttgacgtggtgcttatgtggtattagaatgaaaaaaatatatgggacccatttatcgctcacaacaaggaatattgcgggagccgggagacactaacatgtgagacccacacatcatcctccctttctccttaccttcttcctctctctctctctctctcatcgtctcctctatgaggttgttgcttggataggcggcagcagcatcggcatcgccatagaggtggtgtctcttcggcgctggctcgtgcccacctgccgccaccgcacaagaacgcacggttcccggaccccgtcgctggtagagtcgaccacagaagggggaacaccaccatggcgcacagacggtgcagtgcaggaggcagcaaccaggaagggagtaagagcatgccacttgtcgtcgtcgccacgggcgtcgcgctgtccgacgcggtgttggtgctccttcgttgtcctcatggtgttcctggcgtgcgggaggttccagaggagggccatgccgggtgcttaccaaagcggcacaacacaaggttagcttcgatcctggcccggacctgttctacctggacgtcgttaagccgtacgtcgaggccgaccatggcgacgacgagcggtgttgtaaagacgttgccagagttggtcgggctgaggaaagagcccaggtgggaggataagacaacggagttgctatgtccgacaatggcaccaagccgtcgactttgttccattcctcgtgctacttccactcgtcgcacttctcataccccgagctccgggacatgaaggcagcggggagcaatggcatgtcaccatcgccatccggtcggtcaagatgtcggagcttcgccgctgctccagctctccctgcaaaaggcgaaaggggagagaaatagaaagagagagaagggagagagagagggaggaggaagaagggaaggagaaagagaggatgacgtgtgggtcccacaatatttcttttgtgaatgacaaatgggtctcacatattttttttaattctaatactccattcgttcaaaaatataacaatttttagcattcaaagtttgtccaaaagtatataactttttcacctacattcattctcaaccaatcataacctttcaccattcaaattcttcacatactttctcttctcaactaatcacaaccctcttccatttaatcaaacctacttttttaatgctcgtgcccaagcctaaaacttcttatattttaggacggaggtagtatcacataagcgtcacgtcaacgtcacgtaagatgaagaccaagtcaatgccgctacgtagtcaccacgtcaaggaaaccaccctccaaccgccgacagagtcaaattgcaccggttttaatagttaggacttaggagggtcaacatatctgatattgtggtttaaggatacgaatcagattatgccactaggtaagggaatcaaagtgaacttatttccttactctactatgcatgtgggccgtcaggtagccacggttcaagcgagaatgttgttcggcgatcgatcgccctggggatggggcagcgatcgatcccctcccccctccctccctccacccctccacctggtttccttttttggcaccgcattacttttctattttagtaaatttatacacctaaagtttatacacctcaagtttacacatataaagtttagagaccaaaagtttataagtcaaaagtttatatatccgattcaaatttgaatttgaattcaaatatttttttatatatagtatttctatacatctaaagtttatacacctaaagtttatagacctaaagtttataagtcaaaagtttatatacccgttcaaatttgaatttgaattatatctgattcaaatttaaatttgaattcaaatattttctatatatagtatttctatacatctaaagtttatacacctaaagtttatagatccaaaatttataagtcaaaagtttacatacccgattcaaatttgaatttgaattatatccgattcaaatttgaatttgaattcaaatattttctatatatagtatttctatacatctaaagtttatacacctaaagtttatagacccaaagtttataagttaaaagtttacatacccgattcaaatttgaatttgaattcaaatttttttatatagtatttctatatataaatttttctaacttttgtttttttaaaaaaattgtgtggtgcactgcagtggaaagagaagaaggggaggaggaagggaacaagagggaggagtatagggggaggggggaaaccgatcactgggcaatcgccctggcgatcgatcgcccattagcctcccccggttcaagtggcctccatgagtttttttttatgaaatctgcttcacaaggaaattagtaaaatactatactcctgcgttaaatatgattcaaatctataatttcatgtttgctgtaaatgagtactaagtctgattttccaataatgctatatgggttttctccccctgaacttataaatgtcactcttgcacgatgcgtggggagcaggcaggagagcacgtaggcacgtactagagcgaagggtcgcacgaggggatgttctgtttcacgtgcggacgtttgcacgcggcacaaacacatttgtgattattcacaatgtacacccatttaaaggaggtggcaatttattgaggaaagaattggaatatagccggaagtacattaaagagtcgattttcatgatcaatcgcattgaatttagaatttattacattgatcagtttccttttgaaggtcctttctcttctataaatctcagtgtacctggaggagccaaaccacaaaaaagcatcattagcttctccccggcctgagaattcccgatgcatcccatcatcgctacactcctcctcgccgccgcaatagcccccggtctcacggtgggttccccatctctcatcaacgagacatgcaccgcaacttccaactatggctactgcttgggcgtgctctcggctgatccggcaggcgcctccgccacggacaagcgtggcctcgccatcgccgcggccaacatcacgatgcgcaacgtgacgtccacggtacgcgtcctcaccgagctggtagaggagctcaagctctgcatcaagtactaccaggacatggacgatctcgtggccagcgccatcgacgacctgcgtgtcgggcgccccgccgttacctcgttctacaaactgcaccgggcctcggacgagcccggcaactgtgatataatgttgtttgagggaagcgcccacaagaacccggtgagctcggagaacatgtacaacgaggccatttcaaagttaaccagcgacatcgtgtaccagttggtacattaatacaattagcctaagttgcatggataggtccacctccccctcctcctccttaatcttactctacccatgtattgtattgggaggctgtgggtagcatcatgccatttccaggcatcagctaatacagtttgctggcaaggctgcgtctgattgtttctatgaattctgttgctattgttgtgcttaacaaaatgttaaatgcccatagtccatatttgggggtgggtgggttctgatgcgcgactgttcggagccccaaaaagatactgctgagaatttgagagacctcggccactccagcttttgcgaatctccgctacagtcgcctcgttcattctccgacccctcttcctcctctccggtggatcaccaccaacgatggatgaaaggggggtcggatgtctcttctcatctagtagtgtaagtagtagtcttgctttctcgtttggtcaggtcatcgtgttagttcgagttcttctcgttatcatccatcttttactgctcaaggtgtccgtcggcttcgacgctcctcgtcttggtggtgtggtgagcatcaccggttttttagccagtgattggtcacctctttgccgggtttcttctcccagccgttggatgagatacttttagatctgggaaaaaaaggttgcgccaacctttctcgatttctccgacgagttctatacaaaggaggtggtcttcttcttgacctccagtgaagatcaattacacggctgaaggtttcaagttttgctgagatggtctcaacctcccatgcgtggaggccctaatcggggatgcccctcagtttcttttgcagttagtggtgttactcttgctatccttgccggtggtatggatggggctggcttctttggattatctgctttggcgtcgacccctatcaaaacttctggtgggtttcttattcggcgtagctttttagataatggaatataatatctcggcctttgctcaaaaagagctacagccaattattacaaaattccactccagaagagagtgtagttcaagacaagttgaacacaccaaacaggaaaagagaggacacaaactaagaaaagcaaaacaaaaagtggagctagaaggcctcgtcaaagcctaggactgaagttcgaagccaatgcatagaccattgacaatccttgcacgaagaggtttctccaaagcggtgcccccaaggaggacgcgacgtggatcgccgccaccgctcgttcggaaggaagcaaggttttcacccggagaatatggttagaaaaggagaggggtaatctaaaatgacgcctccaaggaggggaacgatgccaaacggcgtcgccgtcgtcagccggccaaacggctcggcaaggctttcgcccgcgattccctgtccaaacccacaccactaatccgcacaagaaggatcttcatcgatcaacaacattgtccctttagaaattcggccaaggccaccgcccacagttcttgacagcgcgcccgcacccggactcctccttccccgtctccacatgccgctgccgacgatgacgcaccgtcagcctcggatgatggccttgcaccaccgtcgacagccgccactgccagcgccacagccaccaccgtcgccagccgccatcgccagccaccatcgccaccgccaccaccaccgccaccgccacccccgtccagccgccaccatcagccaccaccgtccagtcgccaccgtcagcctccaccatcgccagccgccaaccgtccagaccggcctgggtggcgcggacctgaaggtgcagcgcacagtgcgggtcgccggcgccatggaggaaggcgtcacgggcacggcgtacaattgacgggcgccgcgcctccctcatggcggcaaggttcttgacgagggccggcgtcgcggcacgcgccgtagtccgccgccttcgtcgccaacttcgtcgccgctacatccgccaccatcgccgccgccagccacccccctgccaggtccgtggagcggcgccggcatcgaccgagcccgtcgccggtcgcctcggccaagcggggcgaccggatctggcgcctgcccgtcgccggagccgcggacctctaccccaccaccttcgcatgggcgtctcccgcggcgctgccgcggccgccgcctccgtgcactctgccgcctccgcgtggcccacgcgccacaccgccgccgacccgcgcgtcccaacccagatctggccaaggggccggatccaaaccgaacggcgccggatttggctgtcgttgccaggaccacgctctcgctctttggtgtcgtcggcgccccaaccggctgaccgggagtgagggagaagggagccccgccgccgccatcttcgcagtcgcccggctttgccggcggctgctcaggcggcggcaaggtgggggagaggaggagagtgaggaggcgacggcgaggtttcgccgcccgcgtcgcccttcggcgtagctgaagttgttatttgtttgccatctcctcaacctccatctatcatctatgagaggccccgttaaggattgtgcggtggcgtcatcttgtggagctcacttggagctcacttggatccaacctccgccgatgttaggattcaaagtttcgtcgtcgacgttgaagacagaggcagttcgagcaggactcaattgttttttttttcttttcttcttaagtcctttactacaaaatgttgagctaaagtgtaatctgcccattgttaaggggctcctttgcaaaactggatgggacggaaggagtatattgttcttctgaacttctttaaataaataaatacattgtttttcaaagagaaagaaagaaagatgcacgactgttcagcagctgtggacgagacaaggaaatccaaagctgggctgccccttgaaattctggcccacgtgtaaatgaggaagggaccgaacggaaaaccaattctctcctcaaggcccggaaggcccaacctgcaccgtcaatttttgaagaagtgctagcaaagggcgcgcgctcgggaggaagaagtgcaccatggattgatccgtggtctttcagattggaatcggactcccattgccgtctactactaacaaacactttgttctgaaaacacggcaggagagatgaggttatgggtggtatggatcacaccaacgtgatgacaaagagtgtacgttgtagtgaaccaagacaacacgtgccatgggcgcgcacgagcccttgtgatgcgattatggattatgtgggattgccactcgcccactcgccttctcctgttatgcttcttcgtgctgatttagtaagacgagatgcaggacggctgatggacatgatcaagcaagttccacgtataggttatattttagtatacgccaccggcttctcctacttcttcagttaatttagtaagatttgacgccacaggctgaagatatgcatcatcaagtaattgggaagaagatgcagacctgaacatgctatatatatatatggtcatgggcggtgaacaatttttattttcgagggaattggccggtgaacaacctaatgtgatcttacttcttaagtatatgcaatactatcttactttcacggcttgatttctcatatcgggctacgggatcgaacaaaaatgaagcaatggctgtttagcatgcctgcaagttaacgttgttttttttttcatccaatatttcacttataaaaacctcccacgcataacaccaacaacaccatctgttctctgttgacacgtaaaattgattcacgcaacaacaatgaaaaccgttgtgctttcgtgacgacgaacgactagttttcaagcaaactagcaaagatcttcactttcgtggaagaacccgactgattttcagcgcaaaccagtaaagatcatctgcaccctagataactaggatttggccaaagaaacaagagtaaaagtacgatgaaaacagtagaagaaaataatataggatgataattgttccagagccctaccaagtgcaaaatccatagtatatagtaaaggaatacactgtactgcatatatagaaaactctaggtaaatccgtgattaattctatctaatcaaaaccgtcatttttaaacgacagcttccatgcagacgtatacacgcctcagccgaaagtcgcctctatcctgcaacgctgctccagcccaagtttcagaatttgtctccccttactctggcaacaatgtgatcctgtgtggctagacttcaacaggcatatcatcaaacatagccatgcatccaaccccagccacataaaatcaaccactgaagcctcacatccattgaatcggcaaaagctccatcgctgcatgctagctgcttgaactgacaaaatctgagaattgcagcctcccaagtcctaaccttcttctctagtttctgcagctccccagcaactcgtacacctcccgatgcatcacaaattcctgcccttgtcaagctaaccaattcttaagcaaaccactaaaacaattacaccaactattctatataatttggcctgtctaaaatgacctaaccaaaagccaaattatgctactaacattctccaagaaaaaagacaccaagaccataccacatgttctctatggcgtgtaacacactttctgtctctacttcatgttagtgatatgccctagaggcaatcatagagatgattgtatcacatattatgtttacatatttatccgacattgttccttgaaatagataactccttattggttaatgaatatgtgattctttcatgagactttttatgttgtttgttactatttctaaaggatccctgatcaaatatcatatgtggaacaaatatgtttatatgatcagcacatgtattaattgatgattatgtctcatggatcatggtatagagataccaaattaataatgtggacatatgttggtgaacatgttgttaggtagacccaacatgagacactgcaagagccatatgtgttgtgtcatcagtgatctcattgagtgttgatgttgaatccttagacctgagattatcatggttctcaacatgtgtagtagcttacttagggactgctaaacgctactccgtaattgggtagttataaaagtagttttcgagtatgctatgaaacatgtatagtgggatatgaataatcaagatgggatttgcccctcctatggagagatatctctggacccctcgatgttgcagattatggaagtgcatggccataccaaaggtgattgaggagtcaatcacaagttatataatctatcaacaggttcgagtgaatgattgagctattagaggatggcacatatctagccttgagcttaatcgatatcgtgaggcaaaggggttcatacaactatacactagaggttcagccgatatgatctttatgtatgcccggtgggtatacactagaggttcagccgatatgatctttatgtatgcccggtgggttaataagttctgctggagtgtgttgcatagtagttatagttgctatactctgcttacctgttttcactgattcttcggttaggaataacccatgtgctaatttccagcctcctagtgatgcagctgctttatctatttattgcgttgattccaatggatgctgcaacttcagctgtgtgcaatcagccgtcgatgcgattcccgaaaatagattgacaagaagtgtcgtttgaatcaactccggcacatacatgtaagtgttttgcattaatttattggactgctaattctgctggatacattcatgcattgtttaagggatgtacactttcttttgcacagtgaaaaggtgacagtgaacttttcaaagcctaatgtaacattccaaggacaaggttttgagtcgacgatcatcgtttggaacaatagcgcaaaaaatacaggcacattttacagcgccaccgttgatgtttttgctacaggatttgtaacgaacaacatcagttttaaggtatgttcttgtgctcacaaaacttaatttgcttaattatgtatacggcagaagggtttagtttatctactgattcattctgtgtagaatgcatccccagctccaaagccgggtgatcgtgacggacaggctgtagcaattagagtttcaggtgatcaagcagcgttttgggttgcggcatgtatagctaccaagatacattatttgatgatttaggccgtcattactttagtgattgttttattgaaggttcgattgattttatctttggcaacggcagatcattttatgaggtacgtaccacacaaatcttcgatggttctagttacgttttattttcattgagtgagtaacaaacttgccatgcatctaaccaagtttctgtgcgtttttcagaagtgtattttgaactcggtagctacaagcgatgggatcaacggtgcaatatgtgcacaaggccgtgaatacgcggccgatgacacgggctttgcctttgtcaattgtcgcatcaccggcagtgggctgattttattgggccgtgcatggaggccctactcccgcgtggtcttcgcgcacacggacatgcccggtatcattgtgccgagggttggagcgactgggacgacccgcaacgagatgcgtacgtattctttctactactacttccgtttcattttatattagctgtatgtttctaaacatgtatactacggttttatttgttttaacagcacgatgttctacggtgaatacatgtgtacgggtgtgggcgccaacatgaccggtagagtaccatatgccaaaccgctgacggagcagcaggcgcagatatacctggacgcttcctacgtggacgcggatggctggttaaaaccgttcaacgattctcttatagttaattgagtacaataccatgtaaataatggcgggggtgcaattctttgtacttaacacggttgtttagtactactaagggaccacctatatattcgtcgataaattttctccaaaaaatttgacagatgtaattatagtacaatcgtaatgtaattacactgtaacttatatgtaattacactgtaacttgcatgtaactacagtgtaacttgtaaataagtttcatttaattttgaatctttaaatctattacaagatttgttttggtaaggaagaaaaataaaatcacagcacacatatatgtgtaaggatttgtttccacaatctctattttaccgaaataacatattacagagacatttttgaaagttacatacaagttacactatagttacagtgtaattacatgcaagttacagtgtaattatattacgattgtactgtaattacatctgtcaaatttttaggagaaaatttgtcgacaaatatatagcaaaatcgtactactaatatgtatatatctggtatccggagtactccctctgtttcaaaatgtttgacaccgttgactttttagcacatgtttgaccgttcatcttattaaaaaaaatttgtgaaatatataaaactatatgtgtacatgaaagtatatttaacaatgaatcaaatgatatgaaaagaataaataattacttaaattttttaaataagatgaatggttaaacacgtacttaaaaaattaacggtgtcaaacattttgaaacggagggagtacttatttactcacaatttggcgataaatgaaaatgagtaaccagtaacgatcctgtgtactaccacaaagggggtgtttagatggggctaaaactttttagaccatgtcacatcggatgtttggacgctaatttagagtattaaacatggactaataaaaaaactaatttcataaataagagatgatccacgagacgaattttttaagcctaattaatctataattatcaaaagtttactgtagcatcatattatcaaaatcatggcgtaattagacttaaaagattcgtctcgcgagttagtccaagctcatgaaatgaattttgtaattagtgtatatttaatactctaaattaatgttcaaatatccgatatgacagggatttaaaataagtctccggaaaccaaacagccctaaagttacgaattttctgaagtctcatcaccgcaaccacccgaaacgcaacccctctctggagatcaccagatctactcgtccccaatggcggccgccgccgccacctccccggcgcgggcggcggcctggaccttcgccgccgccacatgcgtcaagctcctgctcgtccccacctaccgctccaccgacttcgacgtgcaccgctactggctcgccctcacccacgccctccccgcgcggcggtggtacaccgacgcctcgtcgcagtggacgctcgactacccgcccttcttcgcctacttctcccgcctcctcgccctcccggcgcccctcgtcgacgcctccctcgtctccctccccgtccccgacgcgccgccctccttcgcctacctcctctacctccgcctcaccgtcgccttctccgacctcctcctcctcctctcctccgtcctcctgctggccacggacgcgctcacgcggcggcggcggcggccgttcctctccctcgcgctcgtcctctggtcgccggcgctgctcgccgtggaccacgtacacttccagtacaacgggttcctgatggggctgctgctgctgtcgctgcacttccttgagcaggggagggatctcgccggcggagtcgtttttgctgctctgctgtgctcgaagcacctgttcctagtggcggcgccggtctacttcgtgtatcttttccggcattattgctgtggccggggtgtggtgaggggattgggaaggttggtgctgatgggggctggtgtggctgctgtgtttgctgctgcatttgtgcccttcctgtactatgggcaggtgagttttgctcggttaatttacctttggaatggacgaattggtatgttttttttttgtttagatactgtaatccatctgtaatcatcagttcacttaaaagtaggaaattatttcttgagaggatttcaggatttttcctgtagttcatcaagtgttcagaattagaagatcggtgaagtttataattaagtagttccctatcagtttgtgcacgtaggttgcataattggcacaatattgtcttactcattgcaacaaataatcttgcagatgcaacagctctttaaccggttgtttccctttggtcgaggcctgtgccatgcttattgggcgccaaatttttgggtattctacattttacttgacaagatcttcgcgtttcttcttagaagactaggcttcaacatccagatacctgaagcttcatttaccggggggcttgttggtaattcgtctccttttgctgttcttcccaaggttctctctaccactatgaattcttatatatttccaagggagaatggctatctcaatggtttaataatttgttttaatgaacttacggattgcaggtcactccaataactacatttttattggtcatacttgctatgtctccttgcctcatgaaagcattctctaaaccccagccaaggcacattattagatgggtgtcatatgcaactacatgtgggtttatgtttggatggcatgtacatgagaaggcatcactccatttcactattccgcttgccctaattgccatggatagcttggaggacgcgaagcattattttgtgttgtcaataggtatgtttgagactttgagtcagttgagtcaccgttaactcttgcttaaactcctacttgcttttactgtaatacctactgtttcacaattttcttagaaaaacatctctttctgattgatacactcctttcaccataatacatactccctctgtttcaggctgtaagatgttttggttttgtcgtaagtcaaacttcttcaagtttgaccaagttttttttataaaaaaaagcgtagcaacatttttaaacaccaaacaaatatattattaaaaatatattcaatggaggatttaatgaaattaatttagtgttctaaatattattacatttttctataaacttggaaaagtttgacttaggacaaaaccaaatatcttacattctgaaatggagggagtactatattcacaaaaaaagagttagaaagcattggggtactggttaccatgtgaataactcatatcaggtgatggttcaagacctaagccaatagaaaatacctaattaaactattcggaacagacaccatcttttgcacactgaccaagaaaatggggaaaaagggaaaagccaaccatgtgatacaacattgttttgtactccctccgtcccaacatgtaagcatttttagctatgaatctagacaattgtgtgtccagattcatagccaaaaattactatattttgggacggaggtagtatttatagtggtatagtccactgctgcaaaccatagtacttctagctttaataatgaaaatggcgtgcagtttttcttatttttataactgaaattgtattttgatgaaccagtggcgttcatctgttctgcactttcacttacgtaaaatctgttcactatggagacacatagtcacatactgcttaacatgtataatgagctattgctgtaatatcctgccatttcttagtttgctaacttgttggacagttggagttgaacaccatttcataactatattttaataactcattgtgtcattctatggtagcaactggagcaaaatttcgtgtaattttgcctcaagacaacctgaactaccagtttaacaatgacttatgaagtgctgattatatattgtttgttttgctttgacatacatttttttgttttgcagtttcatgttattcattgttcccattgttgtttgagaaccaagaatatcctataaaggttatgcttctgttgacctatgctaccctcatgtgggtaggattttcttcccattttgctgcaaaatctcctcaagaagggaagaaagtaaatgaatcaggcagcgtggtcaggaaaaatagcttcattgggtggatcagttttagctatcttttaggaattgttgctatagaattatggtctcaagtattccaccactatgtatttggcagcagatttcctttcctacctctcataatggtgtcactctactgtggtgtcggaatgatgtactcatggatgtggcaactcgcatggattgtcaggcactaatatggtctctggttagcaacacgagcatgctgctttgccttgctgggaacccagcctcgcactaatttgtgataactcacccctcttgaccattgcattaggccatctttcccaccccaagttgctactggggtgggaacatgttgacacattcagttgtacagcgtgatggcaattttcggagatgtaaacctcttgtgataactcacccctcttgaccattgcattatgccatcgttctctccccaaattactactgggaacatcattcatatgttgacacattcagttctacagtgtgttggcaatttttggagtaaccttttcgtgatgtaatgtattcttttgtatggagctgcttgtaccaatccattcttcatgggttggtctttttcttcttctgataattctggaacgtgctctgctgattgtacgatgaccatggagatgcttactgtctttcttttccatttttctggaatgcaataaggtatccattggcctccctgattttactactggtgttgcatcatacttgaacatcacttgttgaaaacacattccaatcacgatgtatcaccgaaatttgttgcttgctgtttgatggaccctgtggtcggagttatctaccataccacaagtgcattcggtgtgataaaagaagttattcttttgttctcttaagaggctacagcccgagttgcagagtcccgttgcaattgaaccggacacgtaagcaactggattaaaagagagagagagagagagagcactggattagatgcaaaataaaaaccgagaaagtttaaaacagtagatgcaaataaaaaccaaaaagtagaaagtttaaaacagtagatgcaaagtaaaaaccgagaaagcttaaaatagtagatgcaagattaaaacagtagatgcaagataaaaaccaaaaagcagaaagtttaaaattgtagatgcaaaataaaaaccaaatagatgcaaaaataaaaaccgaaaaagtctaaataaaaacggaagcaaaaccaaaaaggataaagtttaaaacagtagatgcaaaataaaaaccaaatagatgcaaaaataaaaaccgaaaaagtttaaacaaaaacggaagcaaaaccaaaaaggataaagtttaaaacagtagatgcaaaacaaaaaccgagaaagattaaaacagtagatgcaagataaaaaccaaaaagcagaaagaaaaccgagaaagtttaaagaaaaacagctcaactaaattatcagagccaggtttcgatcctgggacctgtgggttatgggcccaccacgcttccgctgcgccactctgatgttgttggtatgattctttcacaaacttattagatgtcgaaaatattaatgggccttgaccaggacggcccaaaaactaagaaactactcatacagccacgcaggtagaataacaacgacaaataattctcagtattcagtaagacttaacacgatacactctgacagtctacaagttaatctcttggttgcagcatcaaacagcattctcgtacaagcctcgatcaagcttggtgtccacggcacaaaagaaaaaacgagaaggaaaaggcaaagcgaaacgaaacgtcggctccttttggccccaaaccttgcgtaacgtcgatcacctgtgtcacttgctgctaatattttttactttccagttgtcagaactcagaagaaaaaaaacttataaagaactcaaatttcctctttctgctttcgatcggattacgatatactatgcatgttcttggtgaacagcaagttgcagacaagtttgactccttttttgcctttagttagcgatggttttcacaaaatttagtccctctcacaaaattataagtccctccaacttataattttgtgagagggactaaagtttagctcaactttagtccctccaaccaaacaccacctaacttgcatggaccagccacatgtaacaacgcaaggtatagtcaaccatggtcccttaattttccatgtcgatccaaacgtatgaaagctcttgtatgagctagctgtgatgtcatggaatggaagggaggtaggtcacatgagacatcacccggatttgtatctacccttctacggaacctgtactagctcaattcagatggagatttctgattacgactgtatttattttcaatttgagaaaggtaatatcacgtgtgattatgtgtttgctaatgagtgtaattttggttatgtacttatgtgtcaggttattgcctaagccgcgttggccgggtgcacctcagcaaattaatcaccatccatgaagctgttaccatgtcagcttaggataaaattctgtgcttatgggtcaagaatcggataatctaatggaaagacttctgggtttacactgaacctaacccggatttgattatcggaatgccatgtaaacacgttctgacgttcctgtctgtcaacgtttcaggttgattgagttagaataaccacgacgaagcagggtggatcattctgcagaatgaaagactactactattggattcggtttcagacacttttatagtcttcttccctcattggataggagaaaggagaaaggcgataaccagagcagtgatctttttgttcgagtatcatatggatcgttgattcttcttgtcaattctcatcatgacatcatagtcttgatgagatagaggaatcaaaaggcgacagagcaaagaaggcggcaaggcagcttgctcctcacgctcatcatggcaatatggcatcagggatgagcaaatgagaagagggacaaggcgatctcatgagtcatgactaggcatggtaggtgcagccgaacaagaagagctcatcagtttcagcaccaaatcactgcctgcttgcctgaatctgaatgcctgcacaagaactgcagccttaagattgggcatgcaccaggaatccacatggcatatgttgcaacttgcatgcagggattgtgctttacttgcattggctccatatcaaagtggtaaacagttccatcttcttgcagttttgctatccaagtgtaaagggtagaactgaactgttgaatgacagtggttcagccaggtcccgtgtaaatattggaaaagaacacttttgcagtggggtaatcaggtgatgctacttgctaacaccttccctagtcccacctcagatggttgcacataagaaatcacacaagagaacaaactttaaactgaagtacttggtccagaactaacaaaaaatttaccccctgaataacaggcagccaactgataatcaaatcaaatgacacttcaggagtttctggattaggctagaaaatacaatatagtatagctagtaatcaagtgacatgttcagttccaaatttgtgttttttccattgatattttaggccaacaggcagccagggtgcatgatctctgcttgcttttttcaaagcctgtctccatggagtatatctcattatctctgactatttattactactaccagcgagcggctagttttgctgccatcgatagcaacaattttttaccgttaatagctcctataaaacaattggctactctcgatcatgcaacaaatgaaggtgtttcgtatcacctctatcctcaatccctaggacactttgcaagcaacatgagaagaaattaaagaaacaccaagtctcctagcccatgtatatatttttaagtacctatataggagaagaacctgcagctacaatattcctgaactcctcccggttccattgccccatggcattgatggattaaactagaccaagtcacaattaatctattcttgtttgttcttgtgcttgagacaaatagctgtgatttgatggctgctactagtcattgcttactttggacggccggtctccacgggattggtaggagaaagaacaaggctgtagtgtgtctcaaggcatctcagcttctcaagaaccgtaacttatgtaattaacctgcatatagatccaccctaaaccccagggatctgagacaaagtagacttgatttttctgcacaaatggcaaggttggtggtacaaaagtgatagagacgaaacacggtccctgggacacacatcacatgcgtataaatttactttcagtagacctaagctgacccaacgtactactctaaaaaccaaataataatgtgcgtgtaacatcagagagagctagttacatgtgtagtgtttctttaattatgttgcatcattaggtcacagtacgtccttcaaaaacacatatttagaccgcggaacaagcgggttggtagtgccgccacgactcgtgcaagcaacgatgaaacagcgggccggagatatggaagcagccatgcatgcataagcatcagcatggaccagaccgatgcaaactgggaaagcggctggtggtgtggggtgagagttctggtgcatgactctacctagaatttaaatcatgttgagtaattatgaataattatgcatattacagtttaataaaattttggtgagatcatcgcatgcatgtctttaagtgtatatatattaggagagacactacccttaaaaaaagtcttagttaagagcatcgcaaacaatatggctatctcattcccaagctaaaatttaacaattatgaaaaaaaaaatgaactctaacagccttgtcaaccgaatggcttggccaaacttacaccacttctctcctccagccgagctaaaggcccagctaggcacacgtcccaaccgagccgagccggcctagccaacccatggccaagccgcctcattcctccttcttgtgggcggctagccaaaactgatttaccaatcgtggaccccatgcccgccaattttgtttcaattccctccttctctctttgtccccacacactctccgtcactgcacccagattgagtacatgttgcgatcatcattgtcgtcgttagggtcaccattcgctctggccacaccatcgtcgccttcatcgtctagagttccgccattcactgcggacgtctccgttgtcgtctcgagtccctccgctgtgaccgccatccattgttgcacgccatcgccgttgtctggagggtcgtctcctgttctcgacgccgatttccaccaccagtgctacccaaaaagggggagagaaagaggagatgcatgatctcgtcagtggcactgtaggggagcacacaacgttggggttgatgggaggagtcagggaagtttgggaggcggagcgtggttgcccacattgaggtgtgtcaccagccctttccaccggccactagcagtagtgcacttggcccgatctattgtctgcttgcccgccccttattgattcccgccacccacaacaccacggcgcttcatctcgcctcggccacctcgttgccgtcggccacgccgcatgctgttatgtcgaggggagtggaaagatgagggagaaagaagtaaacagagagtgacatgtaggacccaatatcatattggagagtgtaataggcatattgttggagtgaaagatagatttggctctctaattttttgacaagctggccaaatagtgtaatctttaatgtggatagaagactagctattgcctctgatgcagatcaagcaagaaatatcggtgataaaggggtaaatatgtggtggaaactcaatttaggtgaaaatttgtgtaaacactaataaaaaagtagtctaaatccattcaaaataatcacataaatggatgagatgatgtaacacaattatgtaaaattcgtgtccgaacttaactttgtgtctgagatatattactacttttatatctcacaaatgaagtcaagtttggacaaaattatttacgtcattgtaacatcaccttattatctatatgtgtgatttttctaaaaaaaattaaacgtcctttcacttggggttacataagtttttatctaggttgtgatttgcaccatatatttaaagacagttgttatgtaaaagaggcgggttaagacctattatattgtattcctccttatatttgtggatgtgcagtgtgctccaccccaccacttaccacgcatcgcacgagtgtttcagtacgtgcaagcagcctgcctcctccataccgctaccaccacaccacaccacactactctcctgatgactcctcgtgacctcctcggccctgaatgcgatggtcgtctcgcttgtacttactccgtcccaaaataaatacagccatagatattcatgtttagcgttttgaccatccgtctcattcaaaaaaaattttaaaaaataatcacacataaaatactattcatgttttatcatataataataataaaaatattaatcatattatttttttaaataagataaacggttaaacattagatgtgaacagtgctaaaactgcacttattttaggacggagagagtagctagctctgcgcgcgcgtccggtgctccttgattcgcacaacgccatgaggacccaacccgatcggatttgccgttcttgacattgtggcgtaatattgtgcttcgttttgctgtaaaagctagctgtcgggagattgggtcgaatgacgtccgtgcaggcggcgagccggttaatgccagggcgccgttaaatcctcgtggccccgtgcgtgcagtgtgaccgtgccagtacatgcagccgttgcaccaacttccactgttactactagctaaggagtagtagagagtactgtagtaaaggttttctgcgagaattcgttgacaaattaaattccatcatcaacttctacatgaagcacgcactgtacatagcggtggaactagtggagtgcatgtacgagagacatcatgggcaactaatctcgcgcgctaaaacattttgtatagatcggttggttgttaatgcgagtgacacatgtgattgctcaaccagacatgcaaattaaatccactgttccaatcacaaatcatcaatacagaacacagtgaaatccgccgacacgctccgctcgatccgagctcgatatggtcgatcaacaacacatctgcgttgcattcatccatgtttgcatcgtcttcttcttttttgttttttgaaagattattcatgcatccatgcttgctcgttcccggaatcatggcatcgtcgtgcatgtgagccagttaatcaacctgctggtgtgacgaagctcgaatccacatttgctcctgaagggcaaagtatagtgatagacgtacgtgaggcttgcttgctcgtatatgctataataaatttattattaatggtcagcgtggtacctgtaattattgtcagctgcacgatactcctacccccaacgccaacgacctctctatgcatgtgcaaggggaatttgcgagtgagtttactaatccaaagtcaaaattcctcatgtctccaaatcatcattccttaattaacaacgcaatccgatcatttcgtgtataatgagacgaaaaaaaaaattcccgtattagattaaggccttatctagttggggaaaaattttagatttggttgtcacatcggatatacggacacacatttaaagtattaaacgtaatctaataacaaaacaaattacagattccgccagaaaaccgcgagacgaatttattaagcctaattaatccatcattagcaaatgtttactgtagcaccacattgtcaaatcatggcacaattatgtttaaaagattcattttgcaatttatacacaaactatttagttgatttttttccacatttaatactccatgcgtgtgtcaaacattcgatgtgatgggtaaaaagtttatgttatgggaactaaacaagacctaaattcccccgaaattcttgtgttacgaaaggaggctctgaactccgattcatgcaccatccaaagctgtggctaatcaaccgttcaacaaattaaatccaacagttcttaaaaaaaatccgacatgagacattttaagtggagtgtagttttggagtttttttttctcccattggatacaccataaagtgtagtggatcaaggggccgacatggttgatgcgtgtctgatgaagttcataaattctcggagatgagatattgaaggcgcgtacagcatgcgtacaggaagcccattacgctggccacggtacctttgctctctctgacaacgatccacgccgttttatctagttggtaagaatacccaatgcatggattaaaatgaaagcaactttcaatgatctgtataaatttccatggacactatggccttggcatgcatgcgtgtagaaacagaggtacatacacgtacatgtatatatgtaccaatgatttttaatgtgtgtccatgtattcatgtctagctgaattgaatgggctctcaacgaattctctgtcggtgcggttactgtacagttcgatcattcgatatgttttcagaaagctctgcagtaaattaaatcaacctcgtgatttttttttttgttgatgtgacgctcatgttagcttgagcttcatccggaagaactatgaggctggctctcttttagagttgaaagctactacttgagcaagccccacagattgttcgaccaacaaacattctagatatatacaggcaacaaagcgtcaaagcaaacggcttttgatctatgtactcgggcctcgtttcagaaatgcaggaagccatagctagctgaaaccatttctttctctcttctgttttttatccttgttctcgttgtgacagatggtaacctgacggctacattgcacggtgacacccgccagcgccaatatttagttttgtcgttcgtgcagcacgtaggctgataaacctgtaaccgggattactctgggctaaaatatatagtgatatgatcaaaggacatgaagtagagcattagctgatcttttggagtaccactttaatctgaagtaaatttgtgcccatttcacggtagtacatcatctttctcaaagttacttgtactacaatgatgtgctttgtctacgaggcaaaaataagataaactaccaacgattaaaatgtaatgaagggaacaatatggtgccgtttgagtttgatgaagataaagattaagtaaaaatatgctaaacaaaaaaatcatcagcacctaattaataaagttttatttattataaacaataaaaatatatttaaattaatattttagaacggccattatataaaatatttttgaaaagagtatcgtttagcagttaaaaaaagtgttaataaaaattgagatgtactccaatttgtatgttattaatcagagaagaacgagacggatacaactcatgtcctacacctccaaaaaccacatctcgacacagagaaatgacactgagaacaatcaaggtcagaaaaagcaaccaaagtcagagacacaaatcacagatgaacaaggaaagtagagagaaaaaactggacatgttcactcaccggaaagtaatctccgacctggtctctagtgatgtgtgtgcttgtgtgtgctctacttctactcgtctcacggctaatcacctggtatttgcgctccgatttcgctcgctctccgtgccaacgccgcgcaccccaaaacccataaataaaggcgcgagaccacacgcagggccgagccttaaacacaccgtctccttcccccccatggcctccctgccgccgcccgcgccgccggccatcggcggcgacccgctcgccgccaccattccgccctcattgccgtcgccggcgccgtcgtcgtcttcgctcaacctctccccgtcgcttctcatcatcaccgcgctcctcgccttcgtcttcttcgcctccgtgtcgatccacttcctcctccgctgcctcgcgcggccgtcgcacccggctccgagcccgctgcccagggcgtcggcggcggcccaacgcgcgacgacggcgtccgccgtcgaggctggggaggctaccgccgcgtcggcggtggggaggagccatgagggggaggcggcggcggggggtggggaggaggtcgacgacgagaaggagcggctgatcgcgtcgctgccgctgttcaccatggcgtcggcgctggcggcgctgcccaagagctcccccgactgcgccgtctgcctctcgccgttcgcgcccgaggccgagctgcggctgctcccggcgtgccgccacgcgttccacgcctcctgcgtcgacgcctggctccgcaccaccccgtcctgcccgctctgccgcgccaccgtctcgctcccgcacccgccactccccaccgccgccgccgccgccgcctccaacgcggcgcaacaggatcccctcgactcgcggagcagcaacaactcgaggagcttccgcgtcgagatcggcagcatcagcaaccgccgctcctccgccgcggccgacgaccggcgcacctactcgctcggctccttcgactaccgcgtggacgaggaggtggaggccgtcgtgtcccgcatcgcgcgccccgcggcggccaagtcaacgaccggttccgtgacgccggcccccggcgaggcgctggcggaggcggcggggtcgcggggatggctgcgcgagtacgtggaccgcctcgcctcctccgcctcgtccctctccggccggtggagcgggcggtggagcgcgcggtggagccagagccaccacagcaaccggcaggaggactcgtggcggtgggacccggaggcggcggtgatgtcggcgccgcgcggggtggacgacgacgagccgggcttcgtcacgctgtaccgttggatcgtaggcgtatagaactagccccctgtaattacaggacctcacgaggttttttttgtcaatttccttccacattttttttactaggactattttgtaaagagaaaaaaaattccagccccagatgagcttaacgtctctgaactctgaaccttccatcgatttggacaacatcgtcgccattctctcttcccattctcctcctgtcctcgcatcaatcctcgcaaattttggcggtattcaagctcagattgtaaccactggagactggtcattcgttcgttttctggagaggcaattttctggagggggaaaccgggcgaatcgcacacggcaggatgccacgccgtgctgtttgctcctttttccttgtggtttatagctgatctggtcgcggctactctgaagcctggtggtgcgcctgcagcctgtgcagatgtgtggattctgaatcacttgtgttgggtggaatggatccatggccgtggcttagtgccctagtgcgtcgtaggcttgcagtcaaaaacgtgtccaatcccctgcgaactgaggacacaccacttcaggtttgttcgttgtggtgatcctttcttgtgcccagttgaagagtgtaacaaaaaaaaagtttaggacattactgagagaatggattagtgatcctagttggatctagtatgtagacagttttagtttttttttccctttgtttgttgctaccgtagcatgctcctggcttgtctctgtcatggagtcgaggatcttgctaagttgggtagcctgcccggtggtccttgttatcattggatatggttggtgggctggaggcttggtgcaatggtgccaaattgccaatccctcctagtagcatatactgaattcagatttttttctttcccggggaatatgaattcaggttttatcatgtatactccctcacttcctaaatacaactattttttggtacgcggatttcagtgcacgggaatcaaaacattttcaaccaaacaagtgacgagaatcaagcgatttaaaattcgaaattcgatcaacaaaatgactgaaaagaaatcttccctcctatctttaatctctgctatacagtgtaaaaagtgcttatacttaggaattaagggagtatgtgagtctctgagatctccgatctcgttagcgttggtggctcctcggatgtggacctggtgaccaatcatcggattaagtacttgcatcgcgatacctgaacaaatgccaaaaccaattcgatcgtctcgccatgctctcggcttcttctcgcacagccagactgatcgtgttagctcgtcgccaccagcccactaccatcattttctagcctgctactactaacgctaaatctgctactaccactgctaatctgctgctactgctgctgctaccaccaaacacaaccgactggtggtgactgccacccaaggaagaggcaccgtcgcgtagcattgaattggattgacgggtttgagcagtgatcgcagcgttgctgtgccgtcgtcggttttaaccacgcaggcaggggcggcgaccagctgcacccaaccgcgcacttcaccttgaatgctctcatttactccgccttcctaccgaaatcgtccgctcgccgctcgtctcgtgcccttcggttcgtagggaagagtcgcctcccctcgcgtggtgccgtgccgtgcagtgaaaaaaaaaactctctcatcttttcgcttatacttatatctattatattattaaaggaatagaaaaaggagcctccacgttcgctctcatggcctagaaattctcacattaatcggagaaaaagaaaaggcagagtccatatagaaatacaatttagaaatagctaaaattcgaaattaaaaaataaggaatattagaagaggagagtagagtccatatagaaatacaatttagaaatagttgaaattcggaattaaaaaataaggtatattagaagaggagattagagtccatatagaaatacaattaggaaataattaaaattaggaattaaatgtaaggaatattagaagtagagtataaagtctatatagaaatacaattaagaaataactgaaattcggaattaaaaataaggaatattagaagtagagtatagagtccatatagaaatacaattaggaaataactgaaattcggaattaaaaataaggaatattagaagtagagtatagagtccatatagaaatacaattaagaataaaatagaaattcggaattaaaaaataaggaatattagaagtagagtgtagagtccatataggaatttaaaactaactaaaatttggaataaacataataaaattaaaagtagagtttagagtccgtataaaaatacaatttacaaataacaaaaattcgaaattaagaaaaacatgggaagaagagtttaaagtcaatataggaatacaatttagaagtaactgaaattcaaaattaaaaattaaagaatattgaaagatgagtttagagtacacatagaaatacaattagaaataataaaaaattataaataaaaagtaaataatattataagaagagcatagagtctatatagatatacaatttacagaaaattcggaattaaaaaaaataaatattaaaagacgagtctagagtccatataggaatatatatgatttacaaataactaaaatttgatattaaaaataattaataactaacacgtatataaaatacaatatgaatattacatattagtagttttgtaaagttgttgcaaaatttaaaactatgttgtcattttaatatatttgaataacataatgagagaacatatatgttattatatgagagaaaatataatgatgctagccgcgcaatctgcgcgggccaccgtgctagtttatatttatatcaactaaaatttaaatttttgatcttaaatttaaagttaattttaaaatttttttcatcatagtttatttttcaacttacttttacaaatgtataaaagttttagtcatgaattattttttatttatagatatatcgtttctttttttttctcaaatcagccaaaacgatgggcctggcggatcgatcggcagatggtgcgtgccgcgtgcgtaccaatgtgtcgtctctcgttgccatgtcgagttgtggtagcgcctgcgtatcggtggcgccgagtatttatggcacgttgaagtgagccggtttgaccgtacgcccatcaccggtgtgtgtacgcttgcacgctggacacttttgcattgcacgggaagcagggctttctctccacgtccacggaccgcctgcctccctgcagccactgagacacgtagttgcagcaacagcagcgaggtcggactcggacgctacggctgagcgggaccaagcgtgcagaggcattgaatcatccatgaccagcttggaaggaaaaccaaggccccgttcgatccaaatttgtgaaagcttcaccctgtccctgtgcatcagctgtagcgattatgaggaaacgcgtggggttgtaggggaatctgattggcgctgcttctcgttttgggggggggggggggggggggggggggggagagaaaaactgcttgaatgggatcgttttgtccagcgcatgattgttcctctcccggaacttacgaagggactgggattctgaatcaagctactgtgactagggatgaaaacggagcggatagtttccgtcggctccggacaaaaacggatacggatacctttcggatcggataattcttggatagttcggatacgaatacgaatgttttctcccggatatgaatacgaatatggtaccaggtttccgtcggatacggataataattcggatatccgcaggacccatgagacataccccatatctttctaactctataaccttcaatatacctttataaaatatacctttatagattttaatagtagtttatctcttaacactagtccatactattaatattatttaaattttaaaaaatatttataaattataccttattttatataaaatgagctaattatatatgttgatatttgtttctattagaagttgagttggttttcgtgttccgagaaaaaattgtttccgtatttgtgtccgatcatattcgattcttattcgtattcgagataatctgtatttgtttccgtattcgagctatccgtattcgttttcgtatccggtaaaaaatatgaaaacgaatatggtatgagcattatccgtccgtatccactccgttttcatccctaactgtgacaaaacagttgctaacttggtattaaagtcgataaacgccgaaacgacgacgaagacgatgaccatatgcaccagtcttcttccacttgcagatgaaagtggatcactggaagcggaagcgtgagtgacactgacaccatggacgacggccattagcagccgagttagtttggccaccaacttctctcgtctcgctagagcaatcttttacactttaataagcgtcctagcatctcaaacggacgtaagtaaaatacgagccgtgtaacaacgcaaggactgacataacacaagcatggcttttcgcaactaacagaaactgcttggagaggatggcacttgggcagccaacaagcttgctagcagctagcccaattccgtatataagtgaagcgttggtggttagcgatatcgcttatgctgactaaaacagtacctgcagcaactacacagattttgttggtgtgaccatgaatgaagctcagtacacttattattagcacggtagtggtatcgatggacctgggacccccgaggccccaataatgaatatatctctgtaaaggaattaaagggtaaaaagccctgcagagcagacaaatgttagtaataaatatataaactgcaacatctgaataactgagaccttggatttaccaggatgggaaaaaagaacgaaccaaagtacttgtactatttcatttagcaaccgaaaacaaaggtaccagtccatgccatgttaatttgtcttgacctgacaaactgatggtacaaatgtaatgtaccaatcaccaatctcaccacgccagatcaaaagggcacagttcgagggggaaacctggtgtctttctagtagtctactgggttacatgatttgtggtccatattttacaaacacgggcggtacaaataacaatcgtaacaatacatatactacaaaaataataaactacatatactccaaactctgcccaaaaaaacacgcttgtatccgggagaacaagcaaaaacactaaagcgtcagagttgttgaacttagagagaatgaaatcaagctgtaacaagtaatcttagcttcctgtcatgctttatcattgaacttacactctctacaaccaacacggtctgcaaaaaagtggcaaaaacaatttagattcaagtttagaaaggaaaatgcatagtaggacttaggataaacgttttatcatcttacgataacattcagcactaatcattctagagaagttgtaaaacgcaagagtgcttagctaagtactggccatggcaagcatagcacaacaaataatgcggaacatattggttacctgaaggcaagtgtaagccaaaccagtggcaaagtagaaatttgcattgccagtcccctgaaattattgtcatgttagtatcagtggcacacaatactaagagaggggaaggatgggagagggagataccctccagatccacaggttgtgcatgacagggctaaggagagagactccgatatatccaaaaaacaagaagaaagtgaattgcatctctacaaaatgtaaagagaaaccattagtgttgtagtgtaaaactaaaccattagttttctagaggactaggagtcattcaaaatatgttaaaagaaatgttaagcacctgctaattcattagcaaataggcccaaaagaccaagataaagagctgaatctccgaccttcaagataaatcataatatggtatcaatgaacttgtgggaaaaaaatcaggacaacacaacaaaaacagtttgatgaaattttacacaaccgagggactaaatttataggtattatcatgtaatgtgtacttaccgatggatacgatttcaatattgcgacaattgctgtgtaaatgaaggcaaggaagcatggacgatgcttcagacggattgccaatggtaataccataaaaacaatgttcatattgaagactataaggaagaagcttctgaaaaagtcaaagacttcagcaaagaagtacctgcacaacccctttaatgagacaaatggaatatcattgagttagttacataatttgatcaaaactcaccataatacaccaatatttggcgataggtccttaacggtaaggataaaaccatatgtcctgcagaaacacagcacaagtcaataggtaatggcaaataaaaccaattgatttcaaatgaaaagaactaagtatgaactaaggcacaacaaagttgacatgttggagtggatagagcaacatggtgttactagcataagatcaaacatgctaataccagaaacagtactccttaagaaaatctgtcctcgttcctcctttcaaaacttatctttagtgagggaaagtaacataaactagcacagtccccccatctcactcaaacacaaattttcatgagtaccaaagaagcatatatattctactaacaaagagttgagtatcttacttttcaaacatctcctgaagaccacccactttatttagaactatgctgctcaatagcaacacataaaatgtccagaaaagcatccacaatatgaagtggaaaactggtttccacaagaattgttgaacatctcttgagctagaacttttatcattgtctgatacgtcagttttactggcacttgagctttttatacgaaatacttttgttggaggagcatctggaccatatcccaataaaagaatgatctggaaaaagaactttgttctcaatagctgactatacaggtaatggaaggcattatcaaatagatgaatataagagtacaaacaaagcttgtgacacaaaccggtacaatgagaattgcaggataaagagagagatgtgtagccataacatatccaaaggcagcaagaggagcaagacctaaaaattagagacattccaagttttaaacagcatgagaacttgttagacttctatgtcactcaaaagatagatactgtcttcatgaaattgttgctactgatgctttgccaaatgaaggccctttttacataacaaaaatgattctactgaaaatttaaaaatagcagaacatgttgaagagaaacacgaatttgagttgcacttacgtgaacaggctccatatatcattatcacaaccattaaattctcgataggtgaagtacatgaacccacacaagtaactattgcccaggggttccacaaatatatgagggaagcaatatctcctgcacttacgttaactgcaggaacagtatcaataagaacaataagtagctgcataacaaacattaagtaatcacaagatgaaagcatcagactatcattagtaaatgaagaatcactaattttgattcaagtataacgtttcaattttacaccttataagttgctagaatcacagtcatctttaaaaaaaaatcattccgaaatgatgtattaatctgaaaataagttgtttcatagcaattccgtgcatctctattatgaaagactagattggctctacaataaagaatgacaattcaatgagtcaatgaaatatttgaagctttgataatataattctgcaagaagctctgtatgctactccattggtaaaaacaagtagataactagtgtcaacaaactaagaacaactaggtcagtatccaataaagcatattctgcaaggagggacacaaaactgtaggtcctcaactatagtgctcacctgaattactcactgcctctgtgagctcaagtgacttcaagtttctgttgcgtgctatttggagtctacgaccagttgctcggataagcatggcagctataaaatctacggccacaaaaatcaaactgtcttgcattcatgagtgtaatataaattacaagatctccaacatagttcaaaaagataatggagtacattggaggcttcattttttttatttggtctgaatcattacatggtaacataaaaataataagaacataatttaaaaaatcatcatagaaaatccttttcatccatggaaatcaagtggctaatactgttagagaatagagacacagatcctaggtgtaatggaaaaaattacataacaacttatttacctgcaatatatatgatcatgatgtccaacagacctgtaataccatgaaatacaaggatgtgagtatttcaaacattgatctgatattgtgataaaataaaccaatcctgtcaaagcatatagctgcagtagtgcaaccaattgcgatcagagaagcatcatagacaaggaattgatcaccttttgttagtcaatggaccaagaaccaatagaagcaaaggggaaccatgatacattgaacctgaaagacaaaacattcaccgtgctgaataatcacttccagttcatgctacaagaaaaacacattgcaaagagaccctactaaaacatcatggataaacctataacaatgacaaatacctgcacaattatttgctaagtaaaaggtatggcaattttgcgcttattttttttaacacaccccattagtgcgggcttgcagcagttcatgcttaatggagcttactagaagaagtagcacccaatcaatttactttacttttaaaagtgctctcatgtagctagtaattccatccctatactgagctcaacaattcacgacttcagttgtcccccccaaaaaaaagtaatcaagcaagattaagatgtgtggaacgaaccggagtagggcgacatggaagcctgcttcagccagtacccttccgccactgcaaaacacacaggaaaacaagctattagtccaattacggcgacaacacagcacagctcaagtctgggacgaggaggcaggggagcaagggagcgcttacggcggcggatggaggtgaggggggtggagacctcggggcgggaggcgaggtggaggtccccgccgaagagcacgagaacgagccggaacccgacggccgccgcggccatcgaccagaagttccggatcgccatcgccgccgccgctgccgcaactccgatctgcgcacagccaccgcttcgtcgtcacggctgtaaccggagccgcggcctggcgattgggccttctacgccaagtcgtcatggatgtcgcctttgcgtaattgagttgggcttcagcagccagcaccggttggatggcccaaatcatctgcaattcgggagtacctatacatctttcgaaagatttttataatcgtatcatacagatttttaatctttgtattaaaatctgatagatataataaaaagcaaaaaacaattaagaaacaccataatgaacattaaattaccatatcctcaagaaaaagaccaaatcaaatataaaatttaaaatttacatgtgaagattcaaaaattacagtgtaacttacaaaagttacagtgtaagtttcataaattacactgtaacttacaagaaaatgcactgtaaatttgagtgagaaaatcgagtgagagataagaaaaaatctttcgagtgagatatagcaaaatcgattctttagtgttaaggcccacattagaaaactttggaagcccgacctggaaaaataccagcacaatgttttagagtggttttcaccaacaggcacaaaggttgaaacgggaaaatatgtggtgcaaaccatatatagtggaaacttagaaactaccgttggatcgagaaacgacgtcagagtttcgtccacgtcaccatgagttaaaatttaactcgcagattcactcatgagttaaaatttcactgggagttaaaatttaactcatggtgacgtggacgaatctcgaacatccatttctcgatccaacgatagttttcaagtttccactatatatatggtttgcactacatattttcccaggttgaaactgtgatcccaagttccaacttccaagcaaagtacacgtgtagttccatattgtattactacattctcataaaatatatactagtaatctaaaatcggattagatataacataatactataatctgaacatgtagaatatggataggaagcacatatcctaattggctagtagtatggatttagacagacaacacatattatatattatagtagactagtattacgggtctagacataagtttattatctatatccatagtacgtttaatccggtttgctaaaatcttctacttcaataataacccatatatgtaaacagatactttttttttaagataacatttgtgtcccaaaaaaaggaagcacagatcataaaaaggtagacaagatcgaatcaaacttctcaaaataccataatgtcttgacgatgacaagtagggtctggtacaacattattttattttagcaaacttataaattattaagacaactattatggtattatcaaatcttgcccgcgtattaaaatgcccaggtctcgcacgctagcttctgatcgaaaccgtctacacgcagtcgacgtctacgcgacaagccgcgagaacgtacgccgccgccacaacacaatcccaagctcccaacctacgcaagctcaccatcgccggccgtcgacccaatcccagcgaccatgaggcgtctgctcgtcccggtgctcctcctcatgctcggattgtctacctgcgagtcctccgtgttgcaggacacatgcaagtccgtcgccgccggccacaagtacgtcacctacaacgactgcatcaaggccttccaggccgacagcgccagcgccaccgcggccgacgcgcgcggcctcgccgccatcgcggccaggatcgcggagaaggccgccaacgccacgtccgcgcgcatcgccgcgctgagagccgcggagaaggacgcgaggaggaaggaccgcctcggcgtgtgcgcggaggtgtactcggacgccgtggaccagctcggggagaccgccgaggacatcgccaggggcggggacgaggccacccaggacgcggtgacgcagctcagcgcggcgctggacgcgccagggacgtgcgaggacgcgttcggcgaggccgacgacgcgtcgccgctggccccggaggacgccgagttcgcgaagctggcgaccatcgccctcgccgtcgctgcgtccctctcgccgccgccatcgacaccggcaaccatggattgatactgtctattaatcatcgtgattcgcgcataattagaaatttagcatcgtggactacattcagctataataaaagatttttcgatgatatgttaaattttttatgctttacttggaaggattttgtccagtgccttgcatgttacgcatgcaacgtggtttagtgggcgagtagccagcttggaatctcatctcgcgctttttttatactccgtacgtggtatgtctttgaacgtgggtgctagctgttttctggaagtgggagcgttgagtggaagcaaggcgtgctgccttctgaacagcacttttgcctttcgccttcgctcccttcttttctatgtggcttgttggcatatattgctacaaaattgtactggtaaatatacagatatatattgatctgctgcgaaattatgatttgtgtatcgttctggattatttggagttttaagtagtaccacgtaaaggccattcggtaattgagcagagcagcgctagatgttgatctcaagaaagatatatgcatcagaagccaatgagagtaatagtgccattgatcatggattcatgtcttgacgttcaccggtagccagaaactgaaagatctaagccagctttcttaccgcatcttgcacgattcatgctcttgatggcatcgtctatcgtcttattgtttgggtgcgtcgaacgtaactgaggtggcagcactatataatacccagattagagcctagctcattggttagatttggggcagggggagataatcagagaaaaaccctcacgcgtcgctctcccaggggcggctcaggaggcaacgacccggccgcccctctcccccacccccacccccttctccgcctcgccgtcgcccgagcggccgccggcgaagccgcgcagccacaaggacggcggcggcggggcgctcctcgtctcctcgcgctcgggcggcctggggagccgcccggagtggcgacggcggtgtccgccagatccgcgccgttccggccggatctgacgggatgggctggcggcggggacgggcgacggtggcggtcgaggtgagttgcgcggggtggtgttgtgggtgatggcggcggggatggtgacggcgttggggtggcaatggtggaggccgcggatccggcggtggcgcacccggatccggcggcggccggtggtggccagagcacgcaggcaccccgcggctgccactggcgtcctccggcgcccctctaggcgtcggccggcgttggtggagaggaagacagccggatctggctccttgcccagatccggcgcgtcctcgggtgggaacggggtggttggagtccggtcgtcgtgcaggtggtgtgaatatcgcaggtatcctcggtgtgcaggtgacatttggtggctcctgtcgtggatgctatggttgatgggtgctccaaggcgaaagtcttgctccgctctcggtgctagcaacggcgacacccttggacgccgttcaccttcttgaaggcgttgctactggagccctcgttcaactccacttcaagagttttctccgggtgaaaacctagattcgttaggatcggacgatgtcgtcgttgtcggcgtaaccttcttaaaggcttcgttttaggagtttatctcttgttggacggctgtacttaggttcggtttgtcaatgtcggggtttttgctggttttcctttaattaaccgtgttgttgtaaggtttttgggtccggtttcccttataaactggatcaactctcttcttctatagtgaattgcaggagctccctgtctgtcccctcgaaaaaaaaagatttgggacaggggaccataagcttagagggggctcagagaaggtgagggatcgacaggcttgcagcattgcagagtgcaaagagagcccgtaattagcagttttatgaaaacgcaaacccccaaatgaaaggcaattccaactaatctgaaaattctgatgaacctgaggatactcgtctcagtgtgtctgtgtgcgctctaatcttttctcctttttattttcaaaaaaaatcttttcctacatctgggccggcccgtcctcaggacgtacacgttctgccgtttgcgatcggtgtctgccgtttgcacgaatgaagcaggcctaacattcttcttccgagagacgtggaattatgaaggaataagttcatctgaagtctcttaacttgtcaacgaatccgattttcgtcctccaaccgaaaaatcagatacaacaagtccctcaactgtcaaaaccagtgcagataaggttcctcagcggttttagctgacgtgacgcctacgtggctaatctgactcggtctccatttgatgtgacactgacgtggcgtttacgtggcaatttgatctaagaaaaacaataaacctcgtgggacccacatgtcagtttcacacataaattaataaaaatggtggggcccatgtgggccccaggtgtcattctcacccatcctcttcttcctcctctttccctatctcccctctcttcctgtctctcctctctctctctcaggcgtgacggagagggagcggcgcgcgccggcgccgacgggagaggatgccgtcgccgcccatggcgaggatgccgtcgaggtcggagggcggcgtggaggacggtggaaacgggggcgggggccgcgatggtgagggcacgacggattcgggccaccacgcctgtcccctccggccaccacggcggcggcacgcccttctcaagcagaaagcggcgctgcggcgggtcgcagtgctgcatgagcgccgagagcaacgaacccagcgtggtgtcctgcagctcgtgcaggaagtgcggccctgccggcgcggcgccgccgacgttgccgtcgcaccccggcacggcattgtcgccaacaaattgtcagcctggtacttgacgatggcggccgggccgttgcggtcgaagcggaccttctccttccaccaggagcggaggttgtcggaggcgctgctcaccggcttgcccttctccgggatgatgccgtacacgaacccctgcgcgttgcacacctccatcatcttgagcatgtacttgaggatcccgtcttgctcctacgactgctgctgctgctcatgcaagctccgccggcgggaggtgaagagaggggagatggggagaggagaggggagagagatgaagagaggggagaggggaggaggaagaagaggagggatgagcaccacggcgatgttgagcaccacgagtccacgacgaggacccccatgaagaagccgaagctgagcacggcggacctcgacacgcggagtatctgcttgactgcttgccggaggcatctagtagccctgcaaattaattaatcagcagacgaagataattaatactcctagctaggtacgtacgttgtcgacgaagaccgttccgaagttgccgacgatgttgatgatgccgaagacgagtccccccgagctgagcatggcgaggtaggagcccttgaagttgccggcgacggggccacacgcctggccgttgcgcgagaggtcggcggagcagtcgcgagcggcgctagctggcgacggccatgaggcggtcatacaccacacgcgggctggcgagtgtgtagacgacgacgccgagcgggatgaggaagctggcggcttagatgtctactccggtgaggccgttgacgacggcggagccgccgaggaggagcatggcggcgtggcgcagaggagagggggagagaggaggggtaagaatgacatcccgcgtgggccccacatttattaaactaatgtgtgttaaactgacaggtgggtcccacgaggtttattgccccgtaagcgccacgtcaatgccacatcagatggagaccgagtcaaattagccacgtaggcaccacgtcagccaaaaccgccatccaaaccgtcgagggatctcatctgcactggtttttgatagttgagggatggattgtatgttgttttacggttgaaggacgaaaatcagattcattgacaagttaagggatctcagatgaacttattctaattatgaacacaagtccaaatgggcttatattactggattgttttgttcagggagagaaaagcccaaatcgagagtgcgtagcgcagcgaggaacgtgttacgtggtcgggacaccggagaacccaatgcagccagccaggcagatcgacgaaaatctcgaccatggacgggcgtcgtttccggcggatcggtgtccggttctcagcatcccattccattcgatgtgtgtcctaactcgatcgtgatctctttgctacagcaacacaatccaaaaaaggccctaggatgacgctgatgcttcgtacgcgatggaactacactagagtagtccactcgtgtcggagcacttcccgggtggatagcatacgatcgatgttccattacgtactattgtgcggcacagctaatgattgtacatgtatgaagtactttcttagcaaaatttgttcatagatactttcaaaaattttggtgttggctaggggacaccgttaaagcaaaaaaaaacttggctctttctttttactatataattcctccgtctttaaatataagggattttttcttccagattcgttatattatgatatgtcacatccaaccaaaagtccaaaatcccttatatttagagacgaagggagtagttcaaaacttatccatgttcgctacgtctatcacttcatctaagccacatagttcaacacgtcatctgtcaccccatgtgaacaaatcatcgagcagctgccgtcctcgcaccacggctcgactaactgccaccgccaccgcccaaggcagaatcttgcaagctcgacaacgccatcgcccatgtcttctcccactccactcggtgccactgctgcttcacttgggccgcactgcctttgctccgctcagtgtctcaacttcatccgccagtggggaaaggtagagagaagagagaggggagatgaaaagtgagaggagaactacactgtggagcatgtatcctttcaggggcttaggactaaccaacaaccaatactcggcaagtgcggtatctacactgctatcatcctaacagggtaaattcgaggtggcgaccggtgagcctcaccaataaaagcttatgcgtgggcagcccgagtatttttgtcatgcattaccattagcacgtgtcaatgggagcaaattaaattgggagtaaggtgagaaaattattagaaagatgtgagaagtaaaaaggatcatacattctaagggttttcacaaatagcttaagttgatttttttttcaaactattttcaaatcgtcaagccaagctttagcttacaattagcattgctatgataccaactgctgtgggcaccacacgtaatatattgtccagtgcttatcgtgactaacacatgtatttggatctacgtgtgttggtcatgttggacacactggacgatatattacttgggatgcccacattacgtctttgctgcgatcccctcttaaggttgtgttctttagggcctgtttggtacaactccaactcctaaatttaactctaggagttaggtctggagtggagttgtggagctgtctaaacccagctctacaactttcattttgtgagagagctccacccagctccactcctagttttgatggagctgaaactgtttggctgagctctagctccagaaggggtggagctggagctatgacaaacaggcccttagttacccctgctgcagcgccggtgcaagctattggattcatccgctatgctgactcaagcgggctagcatccccttgcagcccgtgctgcccagcgttgttttgtatcccatcatcatcgtaagctcagtcagggactcaggccctgtttctttcagcttaagattattataatctatattattgagtcatattactataagctagattgttataatctgtagtagaataagcggttagttgtttcttttctaaattattagagcctagattattgggtttgcaagtctaaaaagggagtggggtggcatggtgggtaatttttcacccaataatctggaaaaagctcacctaaatgagcttatcggattataataagctggactccagattataataagctacttcaataagttgtttgtttctttcagcttactcctaataatctggattataataattctaagctgaaagaaacagggcctcagggtcatgacgccatccatactctgagctatagatgaaccgagtggtactgaggtcatttgataatgtttctgtgtccaaaatagcaggaaataatataacaacgtgtgccataatcgatggcaaataatcagaattttggagcgtttacgaacaaaataagttttgcgaaattctcaaatatcgtttagcttttttttccctttttttgcgtgctttctgtggtcaaatttggagtgccaactatacatcagttgggctgatcctcactctacctgaaaatcattggtccacccagaacgaatcttggctgcaaagttggaaaaaagacgtttgaggctcgttagctactcgagcttggtcgttacatgctttgattcgctcgagcctgctctgaagcttgcgagctctgaccagccaagctcgagctgttcgccaatagcccctctcatctaggctcttttattgtccgttggctttgattcttcatgttaggtttagtcccatatcaataattgataatgataaaatataacttaaaagatgaaaataattgtcacctatcaaattagtattttagcctgtctaaagttatgaatccggttaattctacaataaaaaatatccaatatgttctgagtggtccatggtacactccactttcctcatgttcacatgttgttggatggtctgatagctaggactagctcctccaacccactcggtgcaccatttcttgttatttttgtaaaaagaaaaaaaaacactagttacactagttgttaacaaaatagaccttcggtagcatatttatggcttattcgtatggccacttcatccggctcaaagcggttcgaataaatgtatggtctttgaagaaaatcgattagggtatattttaaaatttcattctacttttgagctttggtgcttcacgcttcacggtgctgatcgattagggtaaatccaattcatgcccgaaaaggaaaagaaatgtctaggctcggctcgatgctgtgtcaagctcgagctcaggcatgtggtcttagggctggacaaaaaactcgttactcgttacctcgctcgctcggtttggctcgactatgctcgttgtattttttaaaagagccaagccacgtataacgagctagctcgatcgagcttgcgagctgctcatgagcttaatgagctagataggagagacattaacaaaacatggcccataagtataactcaacttgctggcccagaaagagaaaaatcagtccatcccgtgctaggcccaaagaaaatgtgcaataggaatgtccaaaaccctagtagacttggtcaatcagtccccttcccctcattctcgatagatccagattcggcatcggcaacagccgcccgtgcgccgcctgagccgtctgcgccgcctccgcacatcccacgccgctccctccatcctgagccgcctgcgcactccctccatcctgcttcgccgtcgcccgtccagcgtccagtggccgacgctcgctgcttgccggttcatgcccaggaaccagatggccggtccccaactgcggagctacccacgccgtgatgctcactggtcgctgtcggcctctcgatgagcaacccatgccgagtgtccctgtgcatcacggaggaggaagacgaggtgcagccgtgtaggtgtaacgtactaacatcctcctgtgatttgttcaactgatgattcatttgttgaacacttgactctgtgattcgttgcctcattactttgatacttagatacagttgcatacttggatttgaacgctggtttgataatctgaatttttattgcaaactttttggttttgttgtattggctcgcgagctgaacgagctagctcaagctagccgagctgatccagtcttctagctcgttagaataacgagctggcttggcttgttatcctagcaagccagaccgagccgagccggctcgatatccacccctatgtgggcttggtcgagatcggctcgttttagcccctgacgatagtaaaacaagggatcggtcggcggctcgcgaagcgaaagaaggaggaggcagttttcaattttcacacgactgcagcgccccaccctttcctactctttttatttccccacttgtcttcccccgtgcggcgccacacctcttctcatcttctcctcctatcaactccctctctctccaccgctccgcttgcctcggatcgcgctcgcgctcgcgcggagcagcgcccccaacgacgggcatggccggtgacagcggcaacagcgacggcggtagcaaccgggatgaggaggtccagatacagatcgcaggtcaatcaaatctttcccccccttcctctgtcgaaagcctcactgtttagctatgtccgattttcttcgttgagggagtgggggtgaggaggttagagtcgtcttgcgatgggcggcggtaaacgcagatgaaatgaactcgttcgttctctcgggcttatttggtgttcgatggtgtggggaagtaagcccgcgaggtgttcgatgaattgccttctcgtgcgtggcgtgttggatatggccatatgcccatatgggatttgttttttgtttatagaccatattaacttttcagactatcgtgacatcatcgagtggcagagtaggcatgtgagtttaattggcaaacccctgttgttcgcgtacatgagctggataagtggttgatgatagcaccagctatagtaatgcactgcatttaacaaaagtaaaatctttatattagtttttttatattagtgcaggatttccctgagattccaagtaactcgctttcatttgatagtttcaccaatggacaatactgtaaggatggagctatagtcttgtgttgctcgactttctctcaataaatttagagcttttggggtttatatggccaattgttggggggaaaaaaaggagaggagggtttcacttcactatgggaactttggtagtctattttgaataggaaaagaaagtttcagttggccgtgctatgcttaacacatgaagtttgggctaacctgttgatactgcctaccttctgtaacttgcagattcatccaaagctgcaacttcgtcaactcatgaagtacctatacagaactctcctgtcaagagttggcaatggtggctgatggtgggagttaacatgttcttcctcattgccggtcagaccgcatctacacttcttgggaggttctactacaatcaaggcggcaatagcaagtggatgtccacattcgtccaaactgctggctttccgattttgttcattgccctatttcttttccattcaaagacatcttctacacaaacagtcactagtagtcctgcccctacaatttctatccccaaaattactctgatatatgttgtcctgggcctcatcattgctgcagacgacttgatgtattcctatggcctactatatcttccggtctcaacatattcgctcatctgtgctagtcagcttgccttcaatgctgtcttctcatatttcctcaatgctcaaaaattcacccctctgattttcaattccgtagtcctccttacgttttctgcttcactccttggagttgatgaagattctcagggaactactagtatatcacatgggaagtacattttgggtttcctgttgacactaggggcatcagctacatactcgctcattctctccctgatgcaagtcacatttgagaaggttattaagagggagaccttctcagttgtgttgaacatgcagatatatacagctctcgtggcaacattggcttctcttgttgggttatttgcaagtggtgaatggatgactttacaaggagagatgcatgcattccagtctgggaagctgtcatatgtaatgacactgctgtggacggctatatcttggcaggtagcatcagttggagtggtgggattgatctttgtggtgtcatcgctgttttcaaatgtgataagcaccctagctctacccatcattcctgtttttgctgtgattttctttcatgacaagatggatggagtaaagattatagctatgctgatggccatttggggatttatgtcatatggccaccaattatatgttgatggcaagaaaggtagaaagactacagtcagtgtagaggaaacttcctaatcatcacaatgttgcctagaatgccgctcttaccaatttaagttgttggttctgagtaaggtactgtagttattaggaacctcatcaaagaaattccatttttgcaccatttggtatataactatacatattgtcttgattactctgatgtaaggatgtatcaagcaagagaataaattttatgtcacccccaattttccttgtcctgtggagtagtcaagtcgatattgtggttgtgatttttggcacgcttggcaagttgatactgtgccattattgggtttgattcaagtgtatacagtcgaatgcaggttcaaatatatgttatcagtgtctatgtgtatgtcaaacatccagattggatggttatcacaatgacttacttggtgatgaaatccaatcataagagggcgacgacgctcgatctgctgatagctctggccggctcataaaaatattaggagaattgaaattgagcaggcgaaagcaatgggacaagaatcagccaaagacgccgccatactgtaacgccaccaggagttagctcgccaaccaacagcttcaccgcatctccttgattttttttctcgcgtctaatttgtgaacaaaactcggaacgggacggccacgacggtgacggacgcccaaacgggcaacctatgatgaccaattttgctatatatttgtcgacaaattttctcttaaaaatttaacactataacttatatgtaattacactataactataatataacttataatataacttgtatgtaactttcaaaaatctctccataacatattattttggtaaaataaaggttgtgggaacaattttttttcagatatgtgtgtactgtgatttttttttcttcctcaccaaaacaaatctttataatagatctaataatttaaaattacgtgaaacttacatgcaagttacagtgtaattacatacaaattacagtgtaattacactacgattgtactgtaattacatctgtcaaatttttagaagaaaatttgtcgacaaatgtataggtggtcccatgatgactgctgaggtagagtgggccatatacgggtcgaatcttcttcgttgcttttgcacgagcgatcacattcggcccattgagccagtcagccagaggaataagttcaccggagatccctcaacttaacaacgagattttttgagatcccttaaccacaaaaccagaaatctctacccctaaactatacaaaaccgttcactcaaggtccctaggcagtatatatgggtggtttcactgacgtggcatactagtcagaaaaaaaaaattatacgtgagggccacatgtcagctgcacattccttcccttctcttatccttctcctcttttctctcttctctcttctcttcttcttcagtgagggatctaggccggcggccggtgggcggagcggcagcgggccggcggtggacgagcgcgccggggcggcgaggagaatggcggagaaggcgagtgaggcgggcggcgaccttgctcccgttcgcgtgcgtggagttcttccgaccttgctctcgtccggcggtgcgtccagggcgcgcccggcgccgtggagttcctcttgtccgtcgtcaaggggcagcacgccaccaccgtggacaagacgacgtccacaccgctggttcgttctttctaggaagagacgacgtgcggcgtgcaggattcggcgaaggtgagctcgccggaggaggcggctttgagcatcctgcatgcttcagctctcctccttcgcctgcttccgcgccgaccccactgacgacgacttcatcacgccattcccatacgcgtcccacccgccgccctcgtctcctcagccattgccgccgctggagcttgagctggtcgtagtagagcgcggtcagcacctcctaaccacaaaaccgttagtggtgtgcatgcatagcttagttagctgattagttagagttagtcaatacatgcatgtgttgcatgagttgtgtggcagttagcttcgtgtatgcggctagctagtggctgccaaattaagtggatcgcgtgctgcgtgcgcgtacgatgtggccgaagtttgtgttcttagctataaaagtcatgtaatctcggcttccggcttccggctccggccgttcacgccgcccgaagatgatgcggcgcacgttgtcgacgttctggacgcgctcaccggcgccgtcgagcgcgatggtcagcaggtcacccgcggtggcctgctcgagcaccgccgccacgcgcgcggggctccaggtcgcggcacgtattgggagccagcaagagatgacgccggcgaaaccacccaccgctccacccgccacccgctgaccgctccccgccgccggcctccctcaccgaagaagagaagagagaagagagaaaagagaagagaagaggaataacagagaagaaaaaaatatgtacggctgacatgtggaccccacgtattcttttaattgtttttgctgactatgatgccacgtcaacaaaatcacccatatatactgcctagggaccttgagtgaacttattcctcagccagactgctcccaaaaaccagaattcccacgcggccactctgaaagaggactcgcaggaaaattgggaaaaagtatattgaatgtccctcatcttgtcatcagattacaaaattgtccattaaccgcaaaaccgggtcactcggggtgtttaggcagttttgacaccggtttcatctgacgtggcaattaagccagcgtagcacctacgtgggccccatatgtcaatgaaacatcccttctttttctttccccctctcccgtctcttccccatcctcgcgtccgcactccagagtggcgcaacgggcagcggcgagcggccgctaacccacggaccccgacgacggcgtggacgatgggcggcggcgacaagctccattcctcgctcccctcctctagctccctcttcctcggcgtccccggccccttcccttctctccaaacgatcttgaggaggagcagcggcggcaacctccccgctgccatggaccctgacgatggggcgagcggcggctgacgagctccatgtgcacccctcctccacctcctcccatagtgcccccgccccttctctcccgtcgatcttgaggaggagcgcgtggtgacggacctgggactctctgcgtttgtccacagttacgccgcctaccttgacgaccggctcgagatccgcctcctcctcccaccaccgcgctcgactctggccccgcgccgcgccgttcctcgtcatcgacagcctctcccgcatccacggcatcggggagacgctgctcatcgtcaaccacgacagcgccgccgcggtttgtccgggacaggcgcgccgcgacggtggcgttggagtagacgggcagctggccctccctatgctcccccttcgccttcccccatgctcccgccgtcgccaccgccggctgtcgcgcctcctctcctgcctcgccccgccggcctcctccccaccaggcgcccccctgcccaaacgagaagaatagtgagagagaggaggaggtgagaaaagaggggaaagagagaggtgatgacgtggatagtctaacaggatgggttcatgtggtcccacgctgattcagatactacgtcggacgaaaccggggtcaaaaccgcttaaggattcagagttagccggttttgtaagataaggtatgttatatatctgttgtttttgcggttaagggatgattttgttatccgatgactaagttgagggaccttcggtgtactttttcctaggaaaagccactcttgagctttactgtgcggctgaacggcccatttggcagaaggcccaagtggctcgtgtgttctacgcaatagttaggcccttgtacaaaactagagaaaattctgaatttctgacgaatatatgtgcgtgtagagcagttaaccatgaagttggtattccctgatgagtttgcacgacccgtcaagaacagatatcgatcacaactcacaagcttttccggcccgtccaagaaatattgcagtctttccgttaagaataagaagaagaagaagaagaagaagaagaagaagaagaaatgttgcagtactgcagaaatcaccaagcacagcgtaaggattctgtctcaccgaactgtccgtccattttgcagtacaagactacatagtttgcagaaacggagaaaccaactggaccgctgccaccgaaaatggagaatctatgacataaatactctcaacagccagtttcgtagatcgtgcttgggtcatcgccatgcgctggcgcgtcagcaagaaggttaagtgcaactccatttgtggtacttatcatggatggtcctaatacagttctccatttaagggcttgttttgttgtgaacgcatcaattagcgacgcatgtgcttgaaatactttgctcatctattgcgttcatacgtacatcatcaacttaacaactgtaaccagacgcatttatcctcgaggttggtggaatggcgaccatcaccgtacctgtccctggagatgaagtactccgtacatcaaacgccagaagattcttctactccacggaagcttcaatcggcctcacacagtgctggatcagtagccttgccgtgcatgcaaccaggctagctttcacggttccatgagcaattgagcacgcaaaattagcccacgatgctgccatgcttaggatctcaattaccaggtcgcaagaaaaaaatcattctgagtaggcggtttcatgttgtcctggaagtacaaaaacaaaaacagaagagcaaaacgtgtttttcattctccaggagagcaacgatcgatcgagccacggtgtagacaatgtcccaaattaaaagagagttgcgtgacgtcctacgatttttccctggctcccaacaaacgcttgatccgtcattcaatcaattgcgtaatcacgctcgctcgggacctgaagtttgttgcgcgttggcgacgaggcacttgaccagcagcaggccacagcccacaggggcaagtccatgtccatccttcgccgcaaagcagagcaaaaggggagcagcagcagcagccagacagccagccagccaacagacaccgggaccggagagatcgaccgatcgatcgaccaggtcaggcgtggtgtgccccggccgacaagaggctctggctcggttcaccgctcggcaaacgcaagcccgggggcacgggccgccaccggcgcagtcagccaaaacgcacgcagaaacgcgatccaaccaccgcccgatcgaggcgcgcagaaaaggcggagcggatggcgaaacgagagggttacgcactagtacgcgcggctgcgtcctggagcgcgggtcaaccgtacgtgacgccgcactagctagcgagtgctcggctcatcatcacacgcgcccccaccagccaccacccaccacaccgccggtgaatgcgtgtgccacccatcgatcgggcgcgccgtctgccgttcacatccaccgcaccgcgagggccgcggctgacctgagcttaacgcctctcggggtgaggattatgcgcattaggcaagcttgttcccgaagcgacaggcaggtagcggacggcagcgtcctgggcgggccagtggtgccgaaatgcaagccatgattgcacacttcttgcgggtttctattgctttctggtgtgtgctggaaatgtatgcatgctgatttttatttttcgttgccaatgctaggctgcctcctttttatcgataaaggaagagagtttatttctagaaaaaaaaggggacttaagcatattccctcggcaataggtgatctataagcttccatgttctggacttctgaccaggcaccaaaatctgtgatcttcgttttatctttgctactatcacaataggatttataagttaaaagagtcgggcatttcgcacttttcaaatttactagctcaccatttggatcaacgagtgaagcgggctctttgaagctcaagtgtctgtgcaagggacactctcctcttatccaccatgctcattactctctgtgttttatattacaagacgtttaacttttttctagttaattttttctttaaatttaatcaagtttatagaaatgtatagtaatattttcaaaacaaagcaaaaatattatcaaaatatatttaatgctagatttaatgaagctaatttgatattttaaattttattgattttttctactaacttagttaaacttaataaaatttgaatatgaaaaaaattcaaacgacatataatattatgacagagggagtatgtcccgttgatctattcttaggtttactagcgcccacatcgctatcatcctccaaattctctgggagaaccgagtctcttccattctcatcctccaaaacagttgggagaagaagaagaaaagccttgattgtttgatcgtggttttatgagctgtgaaaaagctaacctacgcaataatgataatttatatacaaaattatattttaagcaaagaaagccaatgcagaaaaaataaatgaaagaaatcaacttaaatttaagttatacggggtaaaagtctaacttttgctgcaactgataatacgacaagcagatttccatgggaggcgtcattaaaaggacttactgctagcattttacataatcaaattgcgctccctccttccaaataaattactatgagaataggcttatttcatattttggttttttcaaataagttggccatatttgtagtttccatgtacttaagatttaaatgaaaagataaattaaatgtttaatcaaaacatgagaaatcatcttaatattcattggttgcatgcgtatatatgctatttaatttttgttatatgaaagatagattatttttttccttaatcctcagtataaaaataatatgtctaacccttttgatggggggagtactttgcaagtacggttgtggagagaacatatgcaggttgactttttacatattgcttgcacgaagagggttgacttggcaactgcccagtggcatggctcttttgctcttttgacatcatgattattagtactagtagtattcatagaacatactccttccgttctaaaaaagataaatctttggtttccgtgtccaacgtttaactgtcagtcttatatgaaatttttttataattagtattttcattgttgttagatgataaaacataattaatactttatgcgtgacttatctttttaattttttttataattttttttaaataagacatacggttaaacgttgtatacgaaaacccaggttttgattaatactttatacgtgacttatctttttatttttttatttttttttgatggagggagtagagtccgatagaaaaggcgaaatacgttgaaaacaaggagccgaaggcgaatcaaaactctgcctgcactgccgctacaattccagtgatgatgcaaagctcacgttagattagcaggagtaacattcaaaaaattatatatttttctaccggctccactggataatactactatatgatccagggctaattcaaacagagagaaaaatattagcacagcaattgaaaagtccaaccttctattttaattaacagaaagtgtaacgggtgatcttaacaagagtgagccacatctcccaaataatatatttgcttagtgaagtaggagtactagctactggtttgatgttgtttattagcagcaactcctgtactttggtatgttgatggtaccatgagcaaaaacaaaaggatgaatcctaccaaagagctggaagattggagtatataaagttaaacaaacaaataacttgttgcaccaggagaaagtaagaaaataatgcatgcaactaaagagctggagagagtgggacagcatgtaaagcacaaaatgtagcatcggagtgaatttctattcacaactttgcagttgcatgttataatttgtaccgaaaccttaagaggaatctatcaaaacacaaaatgttgcagtattaagctagctaggagaatccaaacactaaacagtgcatgttaacagttaacacgtcataatcagccaccagtcacaacactgcccacacgaatacaacatcatcatcatcacatatgcacatcgtgggcagcccacaagtcgccagcaagacctgaaatgacctgaaatgaatacaaagaatcataccaaatcatctaaatcgatatcaactttcgtataatcgaaggaaattatgctcgctaataacaggacgtactcataacgaatactatgtttgtttgtgtacatcttccaccgtgccatcaagaaaacgaatactacaatctcatgatgtttgtctattgtcacggtagtcaaggcctcaaatcagaatgtagttatcgcaatgattccactctctaacactgattaattgatttgaaagggatgaattaaagtggttgcatcgtgtcatgctagtagaggaatgcatgttctttcccccccccatcaagtttttctaagatttagcagcgtatttttggcctgtgcgcaccgtgttgcacagagcgcttcaaatatgttgttttttccccatctgtacgtggtaactgtgcaaaaaatggaatgagcagatactattaacttcggtatgcacaaagaggttgagaccatttaattagtatggtttggtgcaccagaaaagggagtaatggaggcagaggcagccatcgcccataaatacgctgcctgcctccatgtgaaagctctgaccaaatgaattgaattgatgctatttcatggagtattcatagaccattggatcagattcagaattcatttcagacacaaaacaatcaagaaccttcttttaatccctgtgcacaaagccacatacactcctatccccctctactcagatccctctcactcataaatccagcatttaatcctgtgtacaaacgacctgtaccgtgcagtccatgcacatcaacaagtccactcattcttaaacccaagcatcaaagaaaaaaaaaagaaactaaggttaattaacaattttgcaaatcaagattagacaactagctgtacaaacaaacaagcagctcttacagtaatggtcggctgacgagcagtagtaacctatatgtcaacgaagtggtttggagttgggagtataaaatcttatagagacttttcatggatggacaaaatgcgagtaagaaaggagaagaaaaatctaaaaaggatggtaattgggattaggtggtgataagcggtgaagagaagatgaaaaaggtgaaaaagaaaacgtgaaaagatcaccggaagcgtccgccgtcggcgagcttcctggagcggcaccgagtaatggaggcggcggaggagaggttgtggagcggcgatggccgtagctcgcaggagaaggtgcctgggtcgggcggatgggcgtggcggtggcggcgcccggggctgggccgcacgagagggctgaggcagacggcgaagcccgatggcatggtgctggtttggcgccgccggcatggggtcctccgcatcggtgaaggagatggctgccatgggggatcagtcggcgagctgctctcctcgtcgctgccgtcgcagtcccgctccggcgagagcccacggttgctgaccacgcggcaggagcgcctaggcgggggcgacgaggcggctgcggctgcggctggcgctggcggctgcttcttgcggcggcgcggcatgaacccggcgagccaagaacggtttctgctctccctgttgtcgcctcccttgtccttctcctccgatctgtgatggtggtggtggtggccgaagagcgtggcgatgacggagaacttccccgcgcgccgcttctcgtacccgatgtccccctcctcgagcccgccgctgctgccgtaggcggggccgacctgcggcgtccggaagaagaggaggctgggatgatgcttaagcgcgccgccgcccgaggaatccgacttcctgcgggacacgtacggcgacaccgacctcgggaacgccggcgccgccgcggccggtggcgcagccggaggaggaggcgacgacgacgccccgttctgcgcggcggcgagcgcgagcaggcggtcgttgaggcacgtggcgcagacgccgccgcccgcctggtacgggtgcttcttgcacctcatccccatctcatcgactcatctcgccgccgtcgccgccgccgccgccgcgcgctccggccacgaggaaggagcaatctacaacggcgcacgcgcacctgccttccttcttccccttcccttcccttgaaatttgggcgagttttttaaaacggagattggtgcgcgttttggcgaggggatttttttttcctcttttttttcggtccgcgacgctgcgtccgcgggcttaaataagcttcggcgaaacgaagggcttaccaagtgcaggggggacggagtaaatggtggccttgactacgcttttgggcgaattttggtttgattgcggttgcttttctattcgtgtttgtgagacttgcgagtagagtagaatagtagtagatgcagatgtatagtagtagtactagttgagatagatttggcacgggaccatgcttggatttggttgcggtggtgcggcggctgagcacacatgcacaccgttgagagcgagacatacatgttcgtttttatcggctaatctttgaaaagtgtattttgggtttggcctatctacacgagtcatcttaaagggattccttatcttaattaatccagggagatgctctactgttattgaacaaatgctgccactccactagctagcatcccacaaattgttgcttggccattcggcctacttttcaggttcttcctctctgaagcctataaacccaagccgtggacttcccagacctctcgattctcagccttgcttacggcccttttttccttgtcatgatctggtgtaggtgatttggtttatggttcaaccaaaagcgaagaattgtctcgttaaaccatacgctccagtgtgtcgctgaggtctagacacgtcggtatttatacaccatataatttacagttaattgcacagtgggccacttatgtttaccaaggttgcaacttggactagggagaagaaaatattttcactttgatttagataagtttgcaaaatgattcactttgtaccacttccctctccagctctctcatcactttcttctctacaatctaggaaacttggtgagctcgtgaaggcagcagcacgcggctcaaattcttaatgcatcagatcagcatgagcatgattcaactactaccaatacaggatctgctagctaggtgctcgcttcttgcgttgattatgggaactgggagcctgggagatccttgagcttcacgtcaggtagagggcacggcccggaggagatgctccttggcgatgagcagtaggcgctcgtcgtagcctccgcaaattggggacattccccggtgcagttcaccaaagcatcaactatgcttgctccaatgcttcacgatacgcagtgcatggcagaatgtgtaggtcgagcagagcgcgtacggcaccagcagaaatcgagctcgagcagcaatatatggacggcaacgtactagtggaggcatgcgttcttgaacattttgtgtgtgtatatccttctcatctccttcctccgttgagcctgctctcatctctgcttcctcgtcgaccacaagtagctggccgtgattagggaggagaggagaggaagaacactatttgatattgatgtgtgggccactggttaaaaatgcaaagttcagtaataaaacccggtcaaaagtgaaaagatctgctgatagctggtccaatttacaacttgggtaataaaacctgccctaaagtgcaattcactctataatttatcctcaagtgattacgttgctgactgtgatctctcaggtaaaaaaaaaaaggcccgaccaaaatccattcggagggcgtgaaatcgatagcaaattagcaagtactcgtactatacgtacttaataacgccttgcacgaaccgcatgcaccacacgtataaaccagctcgtcactttctcgggtaatatataatcgcgttccagaagacgtttgcgctcatcctgagccgtactatccattcatccactctcagctttggcacggatgcagtgcaccaaaagttatggaaaagagcaactttcaccgcacttaattagcacagtagaagcttcccgtttacactgatgcttagtcattagtcactcgagaaaggacccggtaaaacagaaagatctcaagacgtacgagcgcgactttgccggtgtcgatcggttttaatttggtcgctgatcgatcacgccgagatggcctctcgccgcgccatgacggagtgggacggagatggactgttcgttcgtctagagaaagagcacagggcgtagctactggtcggttgattgatcgcgcgatcgatggagaccgactcgagagaccgggccggcgcgcgagcgaggaggcaagcgaagcgcgcgcggatgcagccatcgatcggcgaccgcgcgcgcgcgcgtacgcgtcacgtcgcgctcgtggagaagctggcgctgctggcgatggcgctgtccgggtttcttgtgctcgcgccgcgcgggttcgtggaatcacggtgggattgcggcgtcacgagggaaaatatagtgaaaaacgcgcggttgattttgtcgcgggggggaactgtgcaagtgggtagaaagatcagaacggcgacaattctatcgtcttctggagggagaagtgtaaggatacgtccgtttctaacctgttcatggaagtggtcattgtcgagatggattgggattagtccatcctgcttaataataatgtaaaagaagctaacctacttgccattcagcaagcaaccaagtatcacacgcctcggatatattgctagtggtttcattagggtctatatgtttgattttattttttctgatctaaagcatttggctgcgtttgtccaactcacgtcgcaaaggaagctgacgagatagtggaagcgtcatcatcattgcacttaaactactcgtgtctggtttacttgtacactcacgatgaaaattaaggaaagataccgtcaggttcatcgttttcatctcatcgatatatatatatatatatgagatttcggcaatgctgtcgtacgtgtcgtgccgacgccacgcgtcgcagtcgcatctaattcacacagggctgattaacgattgaccaggtagcttcttgctgatcaaataccagaagcgacaggaagggcaacattatcttcttctgcttaatactcttagcttaaacgtcacgactcagcccgatcatctgtagcactatttctgctagtaattaacttttgctttctagtactattaaccatcatgatccgcgcccctttcgcggggtcaagcctgaaagctccacgtacgcgccgccaccgtgtgctagcttttttctctcccactcttccatatgcacctatatatccatttcccccttcacaagggcgccgtgaaaccgatgaatatacgaggacttgtcgtgccatcctgccaaatcgacgtccgccgcgggctcgcgccgcgcgcgggacggacgggacatcgcctcgcgcccgttcgccgcgttgcgcttgcgctttgctcgtgaaacggccgtgcggcagggtgggggcgcgcaggtgcaaagcggcccgtgggcggtgggctctctcgcatcggcaaaaaacgggtggcggctacgtcccttgtcccaggtggcccaactgaacggggagctagttttggacgagaaattgttcgagaggcttgggctcgcgataagatgggccgagacaccagtgctgcaagccggccacagccaggggccaatagcccactactgcggggaccgctaatgcgcgggtccacacccctctcccctatacgtctctctcctcccccttcctcctccccttatccaaattcatttgcacttaataaataccagcttctgccatagtggaacggaggcgcgtcgccatatatatacctcttgtaagccgccgtgcggcgttgtaacctcaccccagatatagtgaagatattttgctggctagcgtccgtggtttttctctcctactttgggagggttttccacgttaaaatctcgtgtcttctgtgattaatctattattctttatcttttgtttgcctatcatttcctaacaccttcttctcttccctactatagtacaccacaaaattattttgaaaaaacaaaagttagaaaaatttatgtaaagaaatattatatataaatatttgaatttaaatttaaatttgaatcaggtatgtaaacttttgacttataaactttggatctataaactttaggtgtataaactttagatgtatagaaatactatatattagaaaacatttgaattcaaattcaaaattaaatcagatataattcaaatttaaatttgaaacgggtatataaactttaggtttataaactttagatgtatagaaatactatatataaaaaatatttgaattcaaattcaaatttgaatcggatatataaacttttgacttataaatttttgctctctacactttagatgtgtaaacttgaggtgtataaactttatatgcataaatttactaaaatagaaaagtaatgtggtgaaaaaaaaagaaaccaggtgaagaaagatggaactgatcgcaaccagttggtcctgtcgatcgatcgcgaatcagcctttccgcactactactagcaatttgcagtttgatggcgctcggcaggcacacgcacaacaggaggactgaacaagtggtggctctctctacttctctagatgaaacgaaaagtttccagctcagtttgtagtgcccatcgtgtcgattggagttcctgccactgtgaagctttttattcgatcgcaactaggacgagtgtcaagctctgattgattgcagcaactaggagtataggacgagtgtcgatatttgattcgattgcaactaggaagtgccagtaacgtgccagcctctgaaccacacgaagctcagttgaatcagtcccaactccagtttcccatgacttggctctagatggttaccgaaaggtcgccagacaaaacttgattattacacactgatgctgtaagtacgtaccttgagagcaaaaaaaagttgcaactactcctgattcctgaaggatacgtaagtggtgacaacttgtgctcaaaccatgggtcaaatggatccaaaactgcttcgttaatagcacttggttgaagaaacatgcttatatactccatggtccccttcaataatggtaaaatgaggtccccacatcctcggatatgtatcaccatcgtcgataaagaattgaggctcaagatcatatgcctatgataatggcacattccatcaatcccgaaagcaaggagggcccctgttcattagtatgctacaaactgactgactagccaaataaatacaaattatcttttcagtcttaaaaatgtgcaatgggcaatgggacattgtagttgatctaagaacattttgataagagttatggatgtatgtactagtcattggttattggttagttcttacacaagtgatatggtataccctctaatattcaggaattcaagatttcaagtcccagtgccgacgtatactttcaacatcatcttctaaggaagaaaaaaagtatgacgagtactaatttaagtcaataatagcttccttagtcaatagagtagttgttaagtccgatgaagttatattgctggataatcaggtgacagtactagcagatcatgcaataatataatccaaagtgaaaaccattcgtatgtaccacctcatctcggttcttttaataacaacttccacatttagaacgtatataagggcataagaactgatcagcagcaaacagaacccaccatatcacaaccacgacttccctttcgagtaagcatactacctgcttatcatttatatgtcaggctcatttgaaaacatttcatttccttgatatagtttgttttaaattttgatgcatttcagttaatcttggaaagtatgcttttcttctatgttatgaaacacacaccgtcttgtggagtttgtgtgactacttgttttctgaaagaatatgctcagactggcatctagcagcatacatgtgttttctgactattttatgttcaaccatatgatacaaatgggaaaaggttcaaggctcaaatgataaaagctttaattactccatcctttgtattgtgagcatctctttaaatacgtagtgcattggatgcatagaatatactctacagataactctcaggaactagttattcttactgtctactctctccgtcctataatataagggattttaagattttgcttgcaacgtttgaccactcgtcttattcaaatttttttaaaattattatttattttatctgtgacttactttattatctacagtactttaagtgtgactttttgttttttatatttgcaaaaaaaatttaaataagacgagtggtcaaacgttgcaaataaaaactcaaaatcccttatattatgggacggagggagtaattatttgaatttgtgccgctcacagatttgaaccctcaaaagataattcaagccgtcagcaaatggggcaaacggtaaaatttggaagagttcctttcaaggttggcttctcacattcacagtcccgcccaaaggtgagcctttttgttcttttcaatgtcacgataaactcattcaaacagaaatacaattacagagacatcataatcaaaattcctggaatagttactgcttttaattagttcattggtcgatgataagagagatttaaagaaatataagcacgtaaggtagataatttactaatttaatgtaaatgattgatcatgcttcacagcaggaccgatggcaaggaaaatcgagcgagcaaagaagcatcgaatcatacaacaaaattccagaatttccaaattgtcacaagctagaggaaccagaggacaatcaacaaacagcactgcttctatctggatcccagaacctgtcttcccccgatatttttcagctgctatctgtggatgtatgtataccaacacaacttaattactctactatgcatttaacttttcaagaatcatttaacttaaagtacaggccatagtcatcctaactatttgtttgggatcattcatgctgatttagaccgattcagaaactgaataaatttttgacatatatttcatccattagatataatatacactccataataccagtgtactttaattaacagaacattatgcactaaagtactaatgatgtgcattatactgtacacatttcagtttgtatcatacctttaaaaatacatattgctgaaacatgtgcgtttcatttatttcaaaagtaactagctgggtggcctgcgcaattgcgcggctagcacccaaacaaaatcatatatttttcagtatgattttacttaagatttattaaatagctatacttgtatttctaattatatagtttttaaaagtcacaccagctgctaccctttacttctgtcatatccttcttttgtttcctcggtctaccactatttctattcattctccttgaaacctctaaaaattggatcttatagttttttgagtttattatctcgttgggtttcgtttttataatttctagaagtcccgtcaaacgctgccattatactcatctacgacccgtccattgtcttttctctttattgtcattgggattttacaaatcgaacataataatcgttcgggttcatttttttactttctataagtcccgccaaaccgtcagtggctttgccattgtactcctttatggttcgcccgctgcctcccttctttattgtcattgagattttaaaatgtatcatgattatcattgttttatttttactttttagaagttccgaaactttaaaaattggaccttgtagtttttagagtttattgtcttgttgggtttcattttttataatttttagaagtcccgtcaaacgatgccactatacacctctacagcccatcccccgcctattctttattttcattgggattctaaaatcgaatataactatcgttggaatttattttttattttctaaaagtcccgccaaccgtcggcggctctgcaactatactcctatacaccccgcgcacgctgcttctcctttttattctcattgagattttaaaaatcgaatgtgtttatcaatgttttttttttactttctagaagtcccggcaaccgtcttgcccgtccctccttttaatcatcattaggattctatttgatgttttactaacagtttttatatatcgtatcaactgccaccactattcctaattaaaatctttttttctttttctaatttatttttttaattaataccgtatagtgtttttttaatatttttattttttatcttttgaatttcagttgaactctcttttattttttattctgaattttaattaatctcatattggtttcttatatggattcttctttcactattgcttatttttaattccgaatttcagttgattttaagttgtattcctactttaacttttcttttctttttgctaatttcaatttttttatttttattccgaatattaactaatctcatattgggttcttatatgtactcttctctcaatattctttatttttaattccgaatttcagctatttttaaattgtattcttacttggactctccttttattttataatttcggattttattttatttttattttgaatttgtattaatctcgtattgggttgttatatggaaacttctttcaatatagcttatttttaattccgaatttcagctatttttagattgtatttctacttaaactctccttttctttttttctttttctccgattaatgtgggaatttctagccccccacagcgaacgtggtgtctccttttaaagctgttttaataataaaatagatatatcaaaatagcactattaatgcactatcacactaataataaaaagaaggaccgaacagagtctgactggaatagaattaattcattagatgtgatgtacatccttcatccatacgatctgtccatgggaaaagttgcacaaagtgagctatccatgtgggtttctgtagagtacaactgcatgcttcgggaatggtgcattcgatcagggcaaggatgcccaagggaaacatgaggagaacagcgtacacaatgtcaatcaagagatcaaacaaaccatggatggaatcagggtaaaacaaatacagtgcttacatgtagattatatgaatacagaattgatctaactggaaattctttccctactgcatgattttaatttcaagactctgctctccagtgaaaaggttcctcacacaacatatcagaaaatcaagactaggcacaaaacctgcgtaagaaaatggaatactctacaacattaaaccaagtttttcatgtgtagatgactgtggggggcgtggcagaattcttgaaaagtaaattagcaaacatggtacagaggggatgtggaaggaagagagaggacataagactccaaacagctcagatgcatgcagctctctcagttgcaagactagctacagcagttgcacgaatggttggtaattgccaatctgagtctaccaatgcaaacaacactatcatgactgccatagggaaagatgaacatagaaaaatgcatgttgcaattgcatctgccgcagcactggtggcagcctcatgctctgaggctgcaaagttaactggagctagcagagaacagatttcgacagtcattcacatgggcatggaaactaggtcgctaggggatttgctcatgctgactaccagcgcggcgacctgtaagaccaagaatagaaccagctcatatttctctatatattgtatactaagttacttgcatgaaacttggttcttttgctgcaggcttaaaaggagctaatgcctttaagatgcggaacagggcaataagcaattatgcctttgagaatctcatgagtaaccagaaagatgtccgacttcctattcgaacacctgatggtataatgcccaattaactcatcaatgacatgccacattcaattagattacttcattttccagggatacaagatgaatgcgaaaaaaaaaacactttcatttgtgtattcatgcagggaagatccatatcaggatggtttctgtgcactgcaagcatgacaagataatattgaacttaggaaaggagcatagtttgagaaccagtaaagaatgtgagcctcattttactatcctctttcttaagtgcaggaccattcaccataggcagtgcaaatctgaggtcttacctttgcttttaatatgtagctgtgctaaattgatttatccaattgtttaatcacccactttcttccagacataatttttgatgaacatggtgggacaacagacttcagctacccaacagatgaacatagctaccatgcaataaacctcgcaacatctggtggaaacatacagttattatttgaagaacatgaacaatacagcgcttggaagtcattcatcagatacctgataatcaacaagagatcaaggctatcctactgatacatgatgtacgaaaattcgacaatcagtagggactcatgctctacattccttacaaacccacacatttcttacgtgaacaataccaatgatcaacatcatgttatgggaagcaccatttgtgtggtggtggaacacatgactccatccacaaatatgattgtgtgtatccttagttggtgcagatcccggaagttatacttcctttgtccaaataaataaataataataatgtaatagaacttagtaatagttattccaccaaaatgcagtttattactaagatgtttggttgaatgatgagatccatcccctgaattatcatctcaacgtatttatgtatattttaagatcacagctagctggcaaaattcaactcagtaaacctgaactgagatgatcagacgggttccaaggccctacccctgccattctcacatattccattagcattaacatcacagcagtctttttacacatttgacaggacaattttggtgtgtttccaacttcagaactaaaaaaggcatgaattatttttgaaaggaagagtttctgtatttatttgaaacataagtatatttttgaaataagtatgtctgatttctatactttttagtggaagcaatagataaaacaattgcattcgctgtaaaccaccaacccatgagcaaaatcgtaagaaaaacaagcaattctacaagcagaataacatcacaagaccgacattaagaaggcaatagcacaaaaaaaaatcctacttacattttaatcaacgttgtaagctgaacttgcctaaacaaatataatgccgtgctccttaatggtgtcgatgacgatgccaagcttcccctcgatcctctcgttcttcttgggctcgtaggacatggcgaagacgtcggcgtccatggacctctcggcgatgaggcggccgatggtcctgcaggcgttgtcgtcgacgagggagggcagcgtggtcctgaggtccttggcgttggtgctggcgacggagatgaccttgctggtgcccctgtgcacgaccttggcgtggacgaagcgcttggagaagaagacgttgagcaggaacggccgcatgtacatgtccgtgcgctgcttccacgacttgcggttgggcctctcctccgcctccttccgcgaccgccgcgtccacgccgcgcgcaccaccagggacgcgcggttgctgggcacgggcggcggcgagagcgcgaggtgggcgatggaggcggaccacgagagcggcggcgacggccggagagagggcggaggtgcgcggcgcggggggagagtggcggcggtggggtacgcggcggcggcggccatgggagcgtgggggtttagacgaggtcgccttatcctgtacttacaccaattcttttaagagtaaatggcatatagggccacttctttttaccaatgtggtaagagtaaaagactaggaagtaggaacagccgagcagcccaacactttaaatttgaacccaaaaagattacatataagttttactttgggcaatttgcttcttccctatctttccctctcttccttgctctctgtcttcttgagcttgttgggttggtgtgaaagctcaaacagacagtaacatagagcctatggagtaccgccctccgtcgcactgctcgcatctcgtcaatttgctcctacaccacatagtccccaagctagagcagctctgcgcttgcgtcgattggaggcggccatctctacggtttatggtcgacgatgagcaggcctaggtccatccttcgttcattataggttaatagcattaggagggacatagcttgctcacgagctcattagtggtgatgagtgtggaagcgtaagcgtggatctggaagaagtgagtttcagtacgtttgaggacatggagaggagctcatcaagtggctaatgtatcaattagttccaatttgcaataaattgtaagtccatccggttcaaagtgaaaatatgagatgagatgagatctagttcattatacaactttggtaaagaaatcatgtccaaattacaattaactctttttttaattgcagaaaaagcatcataactatggcgaagcgatggcagttgagatattcaaatttgtcaagagtgtcagagtgacaacatgcagttttacaaattttcattaaaaaaatatagatcaaaggtacatgttatgaaatgcttttaccaaatttatcattatcctgccgcggattataatagcgtacattgtaaatgcagagtcatatgtgtagcgttatcccttatattaactgacgtaatgggtgcttttatcgtggagtattttacatccttataacaagtttaatagtatagcgaactattagctctaaatcatttatagtcaatctaatagcaggtacaatagcaagctataagccagctataaacatttttaaagagataaagaaagagagaaaagagcagcggactacagatctgtagccagctgcagcacagactccaagacgtaatatgtgtatgacagatgggaccaggtattaatagtatagtaagcaactattgtatgaattggctattacattgactatagatgatttggagctagtactgggctatactattaaacttgctctactatcattcatacaatagttacctataagcatataatacaccaatatatggtctcacccctcatacacataatgtattgaagtctgtgctgcagctgactataaatctgtagctcgctttccttctctctataagcatataatacaccaatatatggtctcacccctcatacacacacaatgtattgaagtctgtgctgcagttgactataaatctgtagctcgctttccttctctttctcttctctcctccagctagacacacaacatattgaagtctgtgctgcagctggctcttctcttctctcctccagctagagacacacaacgtattgaagtccgtgctgcagctggctataaatttgtagcccgctttccttctctctcttttcttctctcctcccgcttttcttctctccactctcttttcttctctcatccccgctttccttctctctcttttcttctctcctcccgctgttcttctctcctccatctagctataaatctttcttctctcctcccactattcttctatcctccactctccactctcttttcttctctcctccccgctttccttctctctcttttcttctctcctcccgctgttcttctctcctccatctggctataaatctttcttctctcctcccactattcttctctcctccagctggctataaatctaaatctttcttctctcctcccactattcttctctcctccagctggctataaatctgctgttcttctctcctccaattggctataaatctatagctctgtagcccgctcttcttcgcttttcttctctcttttcttctctcttctagaaatctgtagctcgctttacttcttctctctcttttctccacatgtgcttacaggtgacttgtagcctgttattgtactcgttcttactccacatgtgcgtgcttacagctaacttgtagcccgttattgtactcgctcttactgatacactccagttcaccccacccagttgcccacaatacaaaagaacaccgatgcacaaaatccataacacgactcaccaaaacattttatacagcgcgtagcatgcatgtacagatgtacctatatgtggtcttacctctcttggataccatggagtcaagacttcaggattacacaaacaaaataatttttcctccagtgaaattagaatatcgaatttcacgagggatttaaccgcgaatgtcatttctaaactcctgattttgatgaccaagtggggacaaccaccacgaaggtaaacatctgaaaaaaattcagtgccaaacaggcaactggtagccaaaaaggctggattgaacgggccaatgagcaacacacgagaaataatgatttgggtggtgccgagggccttcctcttttcccttctctgttggcatctgctaaacaaaatttccaagttacaaagtcttccctcaacataaatgagggaatacaattctacatctaaagagcctacgctaccaatatacatacatgtatagaaagtacccaatgcctccattagtgctaaccaaaccctccaagcttgtaaggtcattgtgaccacatcaagcaaatagcttcgctcccaccaatcgccatcaagcttgcatcaattctgtgtggcgagcgactcaatctgtgtatccttgggctcctaccgttgacaatctaatgtcctctttaaaagaaagggcatgacatccagagcaatatgttcatttgttctcatccgatgtctgtgaaatctgtaagaggatccaactcctcaatgccagaaaggacatcagagtcatactggtacggaacaaactctgtttcagcctcttgaggaagattatcaaagtaggtgaattcagaatcactgatgccaaggtcagatagggactgggtaatgtggaactctgctgagttatgcagaagttgccccggaatcctatgaaaattatttgtaaccggcacttcctgtggttcagtggtcctttgaattttggatttgggaggccttccagattctgatgatgctttgtgctttcctatggacttaggaccagatttatgccgaccggcatcgtatgtgtggaaagcagatgaggcccagtgagaaccttccccttcaaaacaagtttctgataccatcctgtgtaaatgaatgcaatgacacgttaggaagatcagaagcaaaaataaataaataaaaaatgcaaagcagaactgtatcatcatgaagaggatttttccggtgctaataaccactagctccaataaatacacaaaatatctgtgtcaacaattacctgaatctgttctcagcatgtctataagaaagtgtggacagtagtgagtgctccactggctccacagcatgttttaatggttccggttctagtatggacacgttaacaacagatggaaagtccgcctcataatcatctcgatctgtcaagaaatccaattccaattccaaaaagttacggcgggactcatgattgcttgttggaactaccattcttggacattgaacctgagcatctgcgagggctgtccttactagattaaagtttggtctgaagtttgtcatggaccagttctcgctgagtctgccaggtttctggagtgtgttagagtaactcataacacagtgggactcacaggcagacttcgatctccaaacagatgaaagaacagccatgaaatgtttctggagaagcaattcattgttaggaagctcgctgattacattgagcaacatctgagtttgatcctggaaaataagtcatagaaaatcaagttgtgcacacaataagttgaatataaatagtagatttgtttaaagcacacatatacaaaaaaaaacaggcacagtatagatatattcacatgcctggcctcttaactggattaaagcacaagattgcagattgcaactggcaattggcagaggtatgacttgcttattagtcagatagaggaccaaccccagcacgacaaccatttaacacttgtaatcactgtcaaagatattcaatgacttgagcttctaaaaacggccctccaggaattaagaatatggtattttactcaaaatccccttaatttagcgtttttatgtgtgtctagtctgtcggactttccgaatttgagtcatttcagacatattgatcatgtggcatgtttcgaatttgagtcatttcagacttattttagtgagtgagaaatgagaacagcgagaaccatggtaaaaatgtaaaatttgtaaaaatttaaggttgtcagcatattgagaactatcccactaactactcccttcgtccctaaataagtgtagttttagctagtcaaagacatattaaggggtcaaaagactactaagcccttcattaatatggagagaaagtgagtaggatgagggagtactattggttcgatgactaaaaatgagaagaaaaggatgtaggtggtattaaaaaggtctaatgctagtggaccactctaaaactacactcttttagggacgaattcttatgctaaaaactagacttatttagggatggagggagtagatgacatgagtaaactgacctcagatactttcaagatagccttcccagtcccagaaggaaccttctcactgtttgaattgtctgttgctgataagatgtgcttgcagactaattcccggaatctctcacagcaatgcacagggtgacggtatcttcctctataaaatgcaccacctggtacagaatgaagagaatcactagccagttcccaaagagggccgtactcatttacagttgcacaaagaacagcatcttcctcagttgtccacgagtctgaagcacaatcgcgagaccataggctcttcttcttcaatctctcaggcttgattaccatgacacgctttactggcatgcatgggacagaaattcggccatcactcttaattcttgcccccgatttgggatcagaatcattaagttcatctttcaacttaagctgcttgccttcaagaaaatgcttaggtgataaggcctcggaactgaaactcgatttaggggctttcttgagcttcttcaggcttctgctattgctgttctcttcctcattggttgacattatcctcttatgcttgttagaatgatggtgtgctgattcatcgctcattagctctggtgagggtgcattgtcatcaatgctcatagtatctactgatgtttcctcaaccataacctctgactcagatgataaacgtcctttcttcaaagatttgaacttcgctgccttcttcttgttcttttttgacttttttcgttgagtgctgtcaaagattgacaaaagttattcttttaggatacagtaaatagatgaaagcatatggacacatctaaaaccaattggaaagaaaatgcaggcataccatgtaaccctacagatgagcaccaaagtgaagtgcaaaacagcacaaaagctccctctgttttcatgactgtcaacattgactactactgtttctactttgacctttttttttttgcgaggaactattaatggtcaaaattattaaaatgattaatagtttaggattaaagtttcttgttgaagtttaggattaaagaattaatggtgaattgaactttcttgtttatgcttacgatacagtacactttaataacatgacatcttttcatttgtaaaattattgaaaaaagatgagtgatcacagtgtgaaaatgaatagtgcccgctgttagataataaaaaagcagagggagtatatgcatctacccactaaggccccattctaatgtgcttctagggggagctactccctcgtttatcatgagcacgcttcccgaactgctaaacggtgtgtttttgcaaaaactttctatatcaaagtttcttaaaaaacaaataaatctatttttaagtttatggtagttaatactcaattaatcataccctaatcatctgcatcattttgcgtggagctaataagctcaggttatccccactatcgaacagggcctaagagccaaaaacaatgaacaccaaagtgagagcacaatttctcagtctatacctattatcattcttttcctccaactcttttgctgcttcacgggcttgtctttcttgttcctcaaacaactgtgggtatcacatcaggtgacataattagccactagccccaagaggaaaacacaagaatagaagtatgaactgacctgtttttgagctagagcctcaacatgttgccgatatgctgtagtagcaaaatcaacatcccatgctgcagttaagatgatgtgtcaacacaacaaagcataatacaaggaagggtgagtatagcagagacaactacctaaaactaagttgcataaatcaaatatgagatgaaacttttttcgtaagtgctatgggctgttgggtcaacataaacataaaaacacttacactcataagaaagtggttcctggtcttcatcaatttctgcttctaaatcttctttgagtttttcaatgcgttcaagttcccattcttcctcttcaacattgacctgatagtttatagcagctttatcaattattggatcccagagttccaaaaaccgcatggcatatctatcaattggccggagctgattttcaaaagacgaacttgcttgacctgctgcagcagctgcagcagccatctgcttaacatcagcaagcatgtcaatatctccatctcctccagccaaagttatagccttttcttcatctaattgatttatagataaagcaacatgcttgtccttgaccaaatcagaacactgatatttatgctcttcattggtgtgttcatcaggtttagtgtcatcctcgtttacaagatcatcctcctcaagtcttccagcagcctcctcgctgaactcttgattgtccacggcctcttcctgctccagcctcttgagagccatatagtcagcttcatcttctgcctgtctaatagctgcttcaacatcaacatttgacagcgccagattagttccgtttgagggtccagcagacagagagcaatccttctgctgattctctgcatgaagtgatgagtgcccagaaaagaattccataggatcaagcttcttgaagaactctgtattgtagctaccgcgttgtatcactagatcatcaagagctcgcttctgattggctttcttgagtatattctcctctatagtgctctcactgatcagtctatagatgtgaacttcacgagtttgacctatcctgtggcatctgtcttgggcctgttggtccattgcaggattccagtcactatcatagaaaatgacagtgtctgcacctactaggttgattcccacaccaccactacgagtggataagataaaaagaaaaaactttgggttagtattaaacctctgcatcagtgtctgcctctcttctggctgggttgatccatctaaccgcaaatacgtatacccatatagattaatgaactcctccagtatatcaagcatcttagtcatctgagtaaatatcaaggccctgtgtccttctgacttcaaacgcctcaacaaaatagcaagttcctgcaactttccacagtcaaactggatcaaacgcctgtcaggaaagtacacttgacggcgaacaatcgcaggccttataggagagaaaacaggagaaaactcattcatgcatttctctctgtatgctggttcaataagaacaggagatttccctttgttgcaccagaataatggtgcaggcgctcgtgcagcaggaattgcaaaagtaaatgactcaataaaatcaagcattgtcttgaagcgatccaccgatgatagaacaagatttgctaggcttgatgaaaattccatgtggcataaagggttcttcttcttctcgagaatatcagacacaggatgctttatggtcaaaacctcccgaatatttgtgccataaacaggcctcttctggcatcttaccctattccaccatgcaatggaagctgctctttcattagcttcttttattctctcctcccacaaagaattgtgaatctcttcaaaaatatttgtcccattgcttctctgaccatcattagtagagcgagaaatgccagaacccctgagggttatgcttggagaaaaaatggcagcaacctcatcttcctcccaagaagtcatattatattcattttgagtaaatacaaaattcatatctgacaggtcaacctgagaaaatgggcctttatcaaggaccatgccaacagaagagctgatttgcatgttgatccctgccatgtcaaaagagctgataattggacggccttcaaaaagatctggatggttacaaacctttctaagctgcataatgatgctaatcatgccaaaataatttccacttgccaatgttgcctgtgtctctgagcttgcaatgaaatcttcatacaagttcctttgccttctggaaagtcggcaatatatgacatgctcatgcttctgtggcaactgtttctccacatcccgtttcaatcgacgaagtataaacggacgaaggacgttgtgcaaccgatctatcacttctttgtttaccttgtcttggccctctaccatgcctgaaattggattgcagaaccagtccttgaactcttgatgtgactgaaatacatgaggcatcaaaaagtgcatgagagaccaaagttccatgaggtcattttgtagaggagttccagttaaaagaatgcgtcgcttcgaattaaaatttagtaaagtctgccatctttgtgatttccagttctttatcaaatgagcctcatcaagaataagatacttccatttttttcgcttaaacactttggagtcctgaataacaagcctgtatgtagtgatgcatacatggaagtaatttggtttcatccaaccttgacgtttctgttttctctcttttgcacttccaaaatatgtcagtattttaaacgcaggacaccatttgagaaattcagtctcccaatttagcataacactagttggcactacaataagatgtggaccccatattcccttctcacatgcaaggtgtgctagcaaggagatggtcataattgtcttccccaaacccatttcatctgctagaattccattcagcctcttttcatacatagcaacaagccagtccagtccaatgtgctgatattctcgtagagaatgcttaagaaggaaagggaattttgtccgcacatttgttgttgagaacgtgttaccagtcggttgtgctgatcttgcagcagctgcagcatcagcaatcacatcactattatctccattggccatcgctttagtatcagttacatcaccctctttagcagtattttcctgtacaataggctctgatgtttctagttgtagaacactaccactgacatgctcaggtcccagcatgcctgcagattcatgatcttcaaatgtgtcattgttgccctccacaatctctgcagactggtcattattcacttttacggtctctgcagactgatctctggtcagtttcatggtatctgcagaaagatccctgtttacctccacggtgtctgcagactcatcatccacaggcatgttggcattgacatcctcaactgatagtgcaggtgaattttccaattctgttgtgtcatcatctgcatagccatcctaaacataaaaaaggcattacaaatggaccacagtaaagcataactgaagaaagaaatagaaattcagcagataccttttggtatcttgcaagaagttcttcaagtgggatctcactctctttctgcagtaacttaacctacagattaaaaaataataataccaatgatccagaactgtcacaagaaatatgtattgcacaagggtgcctctagtacaccatagtagtatgtcttttgtatcagtcctagtttagacaagaaaatagttttgcatcaatctaggccaaattaggttgtatacactcgaatattcaactggatactttgaatgtgttgccatcctagagcaagtttattgtatcacaaaaagtggtatagtttaaatcggaatccacaaaattactatctagttgttataccaagatatttcgtattaaaatattaaccttaagtagttgtgatagcacagataataaatcgattgtattttattgacaagtttattctactggcaacaaatcaggaactagagtggctaaacttcacagtgtgaaattttgaataataatgatgttcaatgcttatattcacctcatctagaggatcacagtcttctttcttcgccaactcttcctcttcagacaaagtagcttcatcatcctgtcaaaaaagatgagtttatagctgtataagaaaaaaccgcaaaaagagtgagatagactaaatcgatgcaaatgataactaatccatgaatggatgtttctagttttgaaggaccgccacacagtcataggatgcagaatatatgggaaatatgaaggcagtgggaaaaacagatgaagatgttcatggtacctttccttcatcattagcaacataatcttcgtcgtcctgaaaatggtaggtacataacagttgtctacattagagtgttaccacatgttgctcagataacaaataggaggggagaaaagcttttttacttggcagtcagaatccaaagaaaactataacaggaatcacaggaatttgtttgaaaattctaatccacgtcaactttaacaaacttcatttccctaaaaagctttgtacttgacaaaaattgccagtttggctaattcacccccatataactatatttccatccattttattgggtaatgtagtctcaagagaaatcaagtcataatgcaacgtccccccactctgcattttccttttctcttgaagctacaggagagactagagaagttaaaatattccatttaatacgggtagcaaggtccaatcctatttattaacttatttgcaaacattagttggagtatgcaacaaaactaagggatcggcagtaagttgccaataaaatcctttcttccccaccccaataccattcagaaaacttggtccaacaacaattgtctgttcgtactttccaatatttgaaagatttcattatcttgttactaggcagtggacagctggtagcggtgggcataaaaaccgaggacggaagaccggacccaaaaaaacgaacccaaaaagaccgaaagctcggtcattggtcactaattcgggtgtacaaccagaaagaccgaacttaattcggtgagttcggtcgttactttggattaaccgaaagaaccgatggaccgaagcagccaactacctccctgtatccctcctgtacaaggcccacaagtccacaagctcattcgcatgaacacatcagccacaaccttatccctttcgtccatcacgcaaaggcaaacccatctgcgccagccttctaaattcgcaacgccacccatgctaagcctccgagcccccggctgatcgttgcaacgccgcccgcgcctagcctccgcaccgctcgacgctcagctgctcgttgcaccgccgcccgcgcgcagcctctccgtggcccctgctgctcattgcaccatggccagcacccaaactccgcaccacccaggtcccgactgattgtcgcaccaccacctacagcctgcatccaccctacctccgcgccaccgcttgggcctagctctcccagagtccatgtaccttcggtcatttcggtggagaccaaggatcggaccgatagttcagttaactaaatcatcattaacgatttcttgttcactacttctgttttctatttgtaaaaaacgatcttcagaaaaactgaactacccagaccgaattttcggtctagacagaatgcccacccctaacagctagtctttctaagagatatgagtgaaatagaccaaatggtattggaacggagaagacaaaatccaaaacaaatacaatgataataaaaatgttcccctccaaaaataatgataacaaaaatgtacctttgcatcaacagatgagatattgccattgcatttcacctgaaaagtcaagaaagtttgatggcacgttcagagaacattcaaaagctcgaaatcctgagtcccctgtctttactatatactacataagcataagccaaatgacacaaagaaatcaagcatacagtgttctttttcacaaactcagagtaagactggtaatcatctgcttcctcagaagaaatgccttcatcacttgaagtatgatcagattcatcgttgcatccattagcctggttcaaaggatctggaagaaaccatacacaacacaaatcaaatgaaaggccacaatgtgtcaagtatttcagattccaaataccataaaggtgtctgaaactctgaatatataacctttaatcaaatcctttgaatctgagtcactaaaaacgtctctgccatctggactgctttccctgctaactgagaaagcttgaactgatcaaattatcaattgagagcaaagtggaacacagaattgattcctaaaatatgtgaaacatggcaaaagagaactgtttttcggagatcacctttatttttagtgtacaacttgagaatatcatccagtggtagatcagcttctgcctgcaaagcagccaattcctcgttgcgctcagcctccgtaatttgagcttcatcctcatcgattgtgtgttcatcatctttctacagcacaaacacacacaagagtaattcaatgtcctgagaaatgaaaaacaaaccaaaaaggaaaaggagaggtgtcattattatcttttttggacaggaaaatatgtattccttgccctggtacacaacttacaaaaaaagtaataatggttggtgccagtaccagtatctgtagaaatctaacaagttgtaatgctacccacgaaaaataaaaaaaagaatcaaaaaaatcacaatagtagcttactggctcttcacccaaggaactgttgtaatcatcatcgatttccacattgtctgtaaaagcatactgttaaaagctaaagaaaaaggacatttaaaatttcagagatatacagaacatttcataaagctacacaccaacatcagtcggacttgatgcatttatgttctcttgtgctagttcctgctgggatctttgattagtctgtaaagagtcattttcttgattttgaaggcgcacatcaacaagattttctgccagcattgttgaatatctagaaaaagtttgcacaaaacaacagagagtgagcatgcagcgatgaacttactaaaaagtaagatagttccaaaacaaaaccaactgataatagatggtagtacctttcagtctgtcctaagaggaaatcaagttgcttgtctagggccttttttttcctttcctcaagctccagttggttcttataaaaaacctgcatcaaacccaaatataaatagcataaggtttagtatattggaaaatgtggtgttctaaatatacactgagccacaatgaacttgccagcttctctattttggtccagaacttcttcacgtccttagaaatatttagggcaacttttctcaggcgaacttcttcctcctatgaaaatcgcagccaacattaagataaaacccatgaatactgatttgctatccacataatctacggtcattgagtatgtcgctcaatgtgctggttatatatttacttgcagttgaaagaacaaattaggggaaggaacactgcttggttctcaacttatcttcatcaaagttcaattcaatgtgctgttataaataatgtcttatgtactaatgaaatatatttcctagactgaccatagtttatgccaaaacatgcagtacttgtgaatttaacctattctaggctttatttgtcaacctgatcttattgatcaaagtctccaccaaatttaggtttagcaagcagttaagcaatcagttagctatggttcttcattctttattctcggcaggttaaagtcagatcatggtaataaataaagggtactcagttaaggtccctgtgtactgcagtgaggataaactaagatgcacatcactcagttcagcaaacggcaagcatgcagatgtggccatgtgggtcattgccagcaataaattacagtccagcttccttgtcgccttcccagcctccaacctttcccattactacagtttattattctatgtatataaatgataaagctgctgatagccttcaatatgggacagaattgtaataagacaactctcatggagtcatgttaatctgcctaattaataaaaaaaagacaagcaaaccttctgttttctctcgtcctttgttgcttggtcaactacacccttattagctctttgagcaatccttttagccatggacagcttccattttctctcagcatcaaactcctgcacaacatttaatattaaccaagccaagggaataggattagtatatcttcattataaaaccatgcaaattcactcagtgaaagaaggatcatgatctgtcaaatgtactaatagcaagtaacctttgccagccaagccatttctccaagaagatggtcccagtgagttttcgtccttcgaggctccccccttggggcttcaagagcctgcacaagataggacaaaacttttcagtcagtgcaatacaaagaaagtgaaaatggatttacatatatacaaaagaacatgacttaattttccttctctaactaggcctgacaaaatcaaaaacagtattatgcaagcgtggaatagaaagaaaaatgtgtgtgaagataagagaaatagtataacaatgatttgcagctactaaacataaataccaatgctaaaagctaaccttctggcgtctggctcttgtctcatgatctaactttgatcgaggaccttttgatgccatctttccgatattttgtagagaactatctcatgtcttggggcatattcagaaaaatcgtatacaaactgtaaaatacatttagtgcatgagataaaaggtctaaacttttttccaaaaaaaaaaagtattacagaaagaagagaaataaaacagtgaaactaggtcattaagtcatccgtgaatggtatgacatgttttgaactccctacgaattgtccaaaacatctattcacacgtttcaacgagtacccaaaaccaaccatgatcatcatagtcacaatgcaacattaataacccctaataaccaacagagctaattgacagtatctgagcttatacagcatgtgacaacatgaaattcctaacagtacatgttggagttacctgcaaaaacaatatgtagcagaaggcaaattgcacctcagagcaacactagtcaaatgcactgaactcatgttaagtcccatcactctttggtcaaactgattggtcgatcggagaaatgagcacaaaggcatcacataaacgctcagcctagccacattatcaccatcctaactgatacttatgccgcattaccttactcccaataaaagaataaaatatcaccaatcttatgcaccaaaacttcaaaacctgaataccgcaagctgaaaggcaggcgcccatgccatcgacgcaaacccctgcagaaatgctaaaccccacaaaagtgcagcccagacccaaagcacaagtaggagccctaaactacagcgacatagagtcgaatcgactcgatagtttcctcacctcggcacaaaccctctgaaccagagaggcacccaagcgtggccccggggttcaaatcagagaggggcccacccaccccaagcgccccaccggcggcgaccggcggtgcggcctcgcggcggcgaatggccccgtcagggccagccgtcggaggggatctcgggcgagggcctcgggcgccggcggagcaggtcgtcaccggcgagcggcgccggaggcggggcggcggcgagatcgggggagtctagggcacgggggttgcgggggttgggggactccttcccctccgcctcgacgcctcgggagctaaaactcgcgcggctgcgaatggacggaaacgcccctgggggttgcgaggtgcgggcggcgcgcgtggaggcagtctggggatttcgcgtgggctttagtggattcgggcgcttttgggattattttcgcagctgcggggtgtcacgcaggcttggctttgacgaggaggaggtttgttttatcgttttgccccgcttttgattgcgggacgagttcgctgagccggaggaaggatgcgaaatcggtccgccgctatcgacccaagttgttggggtcgtctccgtggggccctgttgcagtgagagaggtacgtcggtttttcaaggagtactccttacacaggatcgcagaaacctatcactatcactctctatcagttgtgcggttgtgccatcttttgggggctgtgttgtaaatggcctggagggaacaatatgggtagttttgatgggctttctaatgggctctcaattacccttctacccaattaaatttgccaagaccatcaaattggaatagctccactttaaccccctcaaatataggtctaatctaattcgtatatctcaaccgtaatgccggatcttgaccctccaagtattaaaaccggggtgaaatgtctctcggtggttttgagggtggttttcgttgacgtggttccggcaaagtcaacacatgggtcccacatgtcacatcccctccctcccaccctacccccctcccccttatctctccctctctctgcccccttcctcttccctcttcgtccctttctttcctagacagctcctctcgccttcttctccacagctgcgtgcacgggatcggggggctagaggcgagcactcttctcctcactctctctcctagcttcgggcacaatggaatcgaggacggcagtcagcggcttggacgacagagccaaggagaatggcgacggtgtggccgaagagaaggacatcacgtcactactagcctcgaggaggtcgacgctggcctcccgttttgtcatgtcatgcacatgtgtctttccctcgatcctgaaccctgactggacgtataggtatgtggtatgccaatgacagttattgaagctgccatcagttatgcatttatggattcgggtctagtgaatagggtatgcctaagcgcccacccgagattggactcgatggtgggtaagacccggagcgaggttgtccacgataggtcgcggcggtgacctcagtctcctcctcatggaggctcgcgacaacgggctctgatgctgcctgcttcttcccccctcttgtcatcgttgaacaccatagtccttaccatggatgaagacggtggcctcttcacccttgacccgctagtcggcgaggaagacccacccatccttgatctccttctcatcaaggctcgcggcggtgggctctaatgccgcccgcttcttcatccccaatctctttctccttccctcttctctccctcatccctcctctgtcaccccgtcgccccctacccgtcacatctcccacggcacgacgttcatcccctcatgcgcgcgacaccgcgcaacgaagattgtgtccgccttcacgatgcttctctccaccggtgcttacacagggacgtcggtgatggccactgcctcccaacccccttgagctactgcatcgtcgttgcgctgttgccgccagcctctgccctcccctttacctcccaccgccttgcctcccgtcgagagacatggggaccgcagctcccttgagctcctctgccatcgtcacactgttgccacccattgccttctcctcaacctcccatcgcctcgggcgccgcgttgcccactcctagagtcgcgccgaatccagaagataagggtagagaagagggggtggagaaggagagaagggatttggcatgtggggtccgcatagtaactcggcctgctagagtaggtcaacgagtcacgtcaacaaaaaaacaccctcaaaaccactaagggagtcatcttgcattggttttaatagttatgggtcaagatatctgatatagtagttaagagatacaaattagatcggaccttcaatcatcaaacccaactaatgaaggaaacggtccatttcgcatccctaatttgagtttgcatcactcaactataaaattaggtaagagtatcctctaacttttaaaatcactgcaaatcgagtccctcgactaatttgaaagtggtttttgacctatgtaacctctacttggcacgttggcatagtcttaatctaacatggcacttgtggtaatcacgaaactagaaaaaaatttaaaaaattttaaaaataaggagacccaatgtgagtcgtagttgtgccataatttttctaatgaaagatgtaggactcatatgtttcacatggaaaaaaaatataagagtaaatttcacaaagctataaatactttgattaaattatcataaaactacatatttaaagtgatgtatcacaaaactacagatctaacaataaatttatgacaaacctactggtttaaggctaagtataaaaaagatatagatttgctgatgaaattatcgtaaactacagattttggggtttaaatcctcagcactaatgctatgtttgagttatataagtccaacttctgttattaaattgatatcaaatctatagttttgtgatacttagtcttaaacatgtagttatgtgataaatttagtgctaaatctatagttttgtgatatatcatgttaaacctgcagtactgtgataatttactcaaaataaaaaaaacatctatacaattaccacttacatgtggatacgagtcctattatatattttttccttggctgtaattacatgtaagcattacgtcggataaggactaagttaatctgtcatgtagccgtaggatgaaagcgccgtgtaaactaccgagggacttgatttacattagttttgataatcggtaacgctctatagccggttttgcgctaatggacacgaatgaagctcaatgcatagccaagataattagggtgtgtttgcataggctggtttccaacccggaacagtaacacggaaaactgagcagtcaattagcacgtgattaattaagtatttgttttttttaaaaaatggattaatatgactttttaagcaacttttgtatagaaactttttgcaaaaaatacaccatttaatagtttgaaaagcgtgcgcgcagaaaacgagagagatgggttgggaaaaaggggtgctgaacacacccttaaagtgtactcttccacagaaataataaacttccaactcaaatttggcccagcaatccaaatatggtgagtgctaggcagccaaatagataactcgtctgctactgaaaaataacgatttcatggttttcggctacaagttggatgtgaatccacataccacatttacgcccccacaaacccaagtgggcgcacacaccttatttttctaccacttaactttatttcagctgttcaccgccttgctgctaacaaagggcctatttcgtacagttccaactcctaaatataactccaggagttgagtctagagtggagttgtgtagctgtctaaggccccgtttggtagggctccaaactccaactcctaactctaaactccaactccagtgagagctagctccggttgaagttgaaaactcgttaaaagtgtttggctatactttcagttctagatctgaaaaaaaaaatgaaaaaatgaaaaaaaacgaaaccaatcggccccagccgcgccgccggccgccggccacgcgcgccgcccgtcctcgtcccgcagcccccggccgccgcagcccttcgccgccgccggcctccgcccgcgcgtcgtcgtcacgccccgtcgccgtggccccctaccgccgacgctaccgtagcccgccgccgccggcctccacccgctcgtcatcgtcacgctgcgccgcctgtcgccgcctgtcgtcatcccgccgctgccgcagcccgccaccgccgccggcgcccgctcgggattgggaggggaggagagagaacgggaggaaaggaggattgtaggggtagttgagtggcattttcgtgtagatactctaaaaaattagagggtagtgggtcttttgggatagagtggagctgtggagcagcaaaaacccagctccaccccgtagttcattttttaggagtagctctgccaactccactccaaaaaaaggtggatctggatcgtttggcacaactccggctcctgataagttggagtgggagctagagctatgccaaacggggcctaaacccagctccacaactctagtacattttgtgagagagcttcacccaactccactctcaattttggtggagctgaaactgtttggctgaactccagctctaggaggggtggagttagagctggagctgtgccaaacaggcccaaagtaacagtgccaccgtgaaggaacagcagtgaattgtaaatagtagaaacaaaacagtactaggcagggaaaatgaagtattattagcactagtatgcgtatcaatcaacagtcggcaatgcacagaagcattgatcagtcactcttgcagaagaaaaaacatgagtggtcagtaacagtcgcgttctcttgttacattggccagaaaaatgtgaaacgatgaaacacaggcgtacatgatagaacaatactgcatctgtaggcgacctcttattctttagtatcgtgtcactatccccccgtgcatgtcctatcatcaacggagacttgtcgtgctaaaccaactcgtcccaatgcaactcatcccctcgaagagtctgcagtctccgtctcaagaaccacgacagcctgccatgcatctatcgagcgcgagcagacggccgattcatcctgacgcttacaccgttgccgccatctgcctgccggccacgccatcctcctcctccccgtcgctccggtcgacgtccaccgtgccactcctgtaccggctcgcgcacacgaggtacacggcgaagtccgcgacggccagcacggcgagcaggaagaagaacttgtcgaggtggccctcgttaaggtcggcggggatccagccggggcggccgcgcacggcggtggccttggtcaccgcgctcacgatgacgtcgctgaagtagttgccgagcgacatggacatcatgcagagcgcgctcccgaagctcttgagcgcgtcgggcatctccccgttgaagaactcgagctggccgacgtacatcatcacctccgacacgccgatcagcgcgtactgcggcacctgccacatgatgtgcaggtcgctgctcatcgccgtggtggcgccggccttcctgaagtgctcgaccgtgccggcggtggccatggccatcgcgccgagcaccaggccgaggcccatcctctgcagctcggttgggccggtgtggcggcccgtgagccgcgacacgagcgggcagacggcccggcggtacaggaagatggtggtggcgacggtgaggatgtcgaaggccgacatgctggagggcgggacggagaagcccgggaaccgggtggtgcggcgcatcgcggcgccctgcacgacgaacagcgacgccatctgcgtgaacacgaccgaatagaggatggtgcagagccagatggggaggagccgcaggatgctcttcacctcctccacctgcgtcaccgtgcacagcttccaggggtcacgcggttgggtgcacgtgccaagcttcgggttagcgcccaccaccgccgcacggtccaagaacctgcaatacatggcgagttcagtgcgtgcatgcgtgatcagttcacagctcacaaaaccacacaacactttacctgaaaccttccgtgtgcaggagcttcctcccaccggaatccgccttctcgtcgctctcgtagagtgtcacggcgcccggcgactcgccggccttccagttcctgcacgcggcgaacgcgacctggaagatcctgccaaccgggttgccgctggggcggatgtaccggtagcggagcgtgccgccgaggaacagcagcagcgcggtggccgcggcggcggtggagacccagaagccgagcgcccagttgccctcgtcctcgaggaagctgaggaaggtgttggagaagagcgagccgaggttgagcgccaggtagaagtagctgaagaaggagaccttggagtgcgactcggccgggtcctcgccgtcgaactggtcggcgccgaaggtggcgacgttgggctggtacccgccgttgccgaacgcgatcatgtacagcgcgatgtagaagatccccagctccgcgccggagtgcggctcgcagggcacgtgctccgtgccgcacccgaccggcctgatcaggtacagccgcgacgacagggacagcagcgcgaggccctgcaggcaaaacaccgtgacgcgaacgagtcagccgcgtgatccacatctcctgggcgtacgcgcaacgcgaccgcgatgtgccttgggccgatcgaccgaccggtcggcgccaccacgtactactctatgcctctactatatggaccatccactttcgacaccagcatacgtgcagatacaatccacccagtacagagtacaggccgaattaactccactctggacagattctcccgcaccaatcgctgttactttgtacgtacgttcctacgcatctatagaccatcatttcccgtgaaatgggcaatcagaacggaaaaaactggtcactgatgattgcccgaccaacagatcagaccgaagtagctagaaacatgagatcaatcgatcgcaccgagaaaggcgcgtggttttcagatagaactgcggagagagagggatgtgccgtgtggtggtgcttacaaggacaaagatggcctggaatatggcgcaggtcttgtagcggccccagtaggagtcgctgaggaaggcgccgatgagggagaacatgtaaaccgtgccggtccatttgctcacgttgttggcggcgtcgccgttgctctgctgcagcaccctcgtcaggaacaacaccaggttcacgtttaccccgaagaacgccagggttgccagaccctggttcactgcacaacacacacaaaataaaaaggtgtcaaggccttcaagaataattctaaacaaacataaaacgatgcacacatgcaaacagtgcgccgcttaactcccccatgaaagcagcaataaagccaaactgtggtagggcgatatcgtactccacataccctacagatcgatcgatcatttgatcgctatgcatggttgctacatcgtggataccatgtccgatgtctcctacggagatcctaatgtggcgctagtaatgcgtgcgcccgaatcccccgtggcgaggaaccctccagttgtgggcgttgcatggccgatgtcacctcgtcatgcagcattccgcgtaaagacccggcgcctaccgccactttaagcctcaacgtcgagtcacctcagaccgacttgcactgttgcgaaaacacttcactggaaagcccagtcatcgactttgtctccattttttgctggcccgtctcagccgggaaggagatggtgaaatcagcagagttcagcacaaagtacttacgaagaataaggccgccggcgagccatccgccggacttgcccttcaccgccggtgagcccttgatatccacggagccatcgagggtgtactcgcagcatacatccttcggggcgttactcgtctcatcgccttccacgacgatcaccctcatcttcatgtctccgtcgttgccagactgcaaccatcaagttacatgctgtcagttagtttccagtttcatgtgctgccatgtatacgcatggtgtttcatcactgaacatggagacaaaactgaatcttggctacagaccaacaagctacagaaacaagctgaaaccgtgtagctttgctaacatatatgccaagaacgatcaaatcatgagcacgtactaaccatttcttgctcctcctcgggctctcctcaccggtggcctccgtcggctaatgcaacgagaagctctgtgtgaggaagccgagcaggaggaagaagaggaggggatctatggaagtggttgtgtctgagcagagaggtctgggatttatagagctcagctgcagctggctagctggctctgcgactgtgagtaggatgtgcagatcacaaaagggaggtggaggagcgtgcgtgtcttgctcgcatgatgtcacaaacaggtattcttaggtatgtgcatcacaccgagacgtcgcgctcgacgatgactgtcgccgtttttccacctctctttttttttttttatcccgttctcatagcccggccatcgtagcacgcaagagcagccttttcccaagaaaaattcagatcgttcctggcaatctcaagtgtgccttttactcttatttgtggtcggttggtgtggctgctcgtgttctgtttcagtaacttatgtgactttacctggttagataattggcaaacgacgaaaaacttagtgccgagtccagcaatttgtctggttttaatcagggtttatctgcacaggaatactacatgacagcatatatagcccgccgcatctttttcactcgccagtctatttatgcagggtaattgcaagctgctagtcgaccctggaaatgggtgcacgccaaagatgcccctcacgctttctcttggaaatccagaaatggagtggcattctacattagactgctacgcttagtcgtggtcaaccaaccattccttcatataatcacatctgcttgagtaaatgaaggccgagactggaactctggattgtttgcccctgaatatgttgccacttgcctgtgtgaacacaaccgcacgatgattattctacgaggctgtacggaacacgagcctcgtctctactagtagctggctagtgcatcgtcacttcgtcaggtagaaatggcaaaaaagaccgaggccccaaaaaaaaactgaaccgaactaagatcagattattgtcatgttttttcactagccaaaattttaagttgaaggttgtaattgctataattaatgctatctcgatgaattgatacgttatatgatgtttgctactattatcttgtgatgtttaattgataagttaaacatgtcctcaaagaggggaaagtgatgccaaaaaaattgttctcatttccgctaattcttctgtctcttaaaaatagtcacatattctggtcataacctaaaatagtcacatgtaagaactggtattgatttaggttacatgcagcggcagcctactgaccttatgtattggatatccgtagattgaacgggaataaaaatataaactagatgacgtcattgatttgtggatatatatatatgtttaacgatttgtcttattaaaagatttacataatatatagtattatttattttgttgtaagttgttttaagcataatctgtatcttatctatttacacaaaattgtcaaataagataaatagttaaacatatatataaaatagttacagcgttacctacaacggagggagtacaatgcacgagcctagataggcttgcacaagtggcaggtgagtgttactactgtgttagtcccttagagatagggatagcatatttactgccatccatgagtttaagctgcgcggaatggatcgagctagctagcgcgagctatcgtcgctgcatgctccgccgctcggtgtcggaggttgcgtcgacaccagtggactggcgccagtggctgccaatgcgccaccagttgccacactcccttatctcgtgcatgcatttgtcattttcgcgggtttgcgcagcagcgatcgatcgatcgatcggaaagccgttgtttcgggctgccgcctgccgccggctggctctcgccggtttcagggaacagttaacagtgcgcggattgacgtccagggttcttcacagtggccgctgtgctttacagctcaacgtgggctctcttccactgatggcatgcagggtagtgtgacgatacatcatcggccggttgccatcgatcggatcatatatcacacgcacgcacgggcgtcatcacgccggttgaggggtgggcgtgtggtggcgcctagttcgctgtggtattactgtcgtcaagcgttgtcaaatctttgcttctgtttttctctagccactggtggttgcaacttgcaactagaggaggaggctaagagagatcccacatatctcggtcactgtatgtgtcgctatatatattgaactgaatcaatatgcatgccaaggtgtcattcctaaggtcatgtgcgatgtggtcgggacctatagagtttacggagagtgctacaaatcgaaagtctgatattttttaaaatatcggacggtgttgcagcgcatacggagaaatgtttcactgaccaataaaaattgtttcaagaggaatgtttcagtgccgcagagaaatgtgtcattgacaataaaaaattgttttaatataaatgtttcagttgtttgtattttggagagaaatgtttcatcagtcttgagaaaatattttatcaccgggttaaaaagttgtaactagatgcaacacttgaaaactactacctgcaacataaagacaacaatatgtgcaacatcgattaaaaacacaatgaaacatcattccacgacaagatgcaacaaaaagcaaataatgggacgactcgatcaggcggtgggtgaatgcaacagttgaaaactactgattgcaacaaaaagacaataatatatgcaacatccaataaaaatacaatgaaacatcatttcacgacaaaggtgcaacgaaaacaaataatgagacgactcgacgaggcggtgggcagcgatggagccgtcggcatggccggtgaagaggaagaagaggtgtggcgcggagagaggtacacaagcagggcagtgatcggcggctcgttgcacaccctaggctccagctcgagcagcgcgtccacggcgacagagaacacgaacacgcggccgcgggagtcgtcgacggcgaagtacttgatgagcccatccgcgtcctcgtagggcagcgtggtcgccgcggcggagtacacgccgtcccccgagccacgcggccgcgacgaacccctgcggtgccctccggtcaccgggatggcgagaagaaaatggggagaagaagataagacataagagataaggatggggaatggcgaatgggaaatggattggttgaatagttaaatgactgggtcccaccatacgcagccgtccggcattttgttttctatcgaacgtcaggaagcattttcgagagtctaccgtgtgccgaggtaaaatgcgaaagggctaatctgcaaattgccatagttttcttccttatttaaaatggttttacgtagaatgtttttatgggtgtgtttagatcggggtgtaaagttttggcgtgtcatatcggatatatggatacacatttaaaatatcaaacgtagactaataacgaaacaaattatatattctgtctgtaaactacgagacgaatttattaaacctaactaatctgtcattagcaaatgtttactgtagcaacatattatcaaatcatggcgtaattaggcttaaaaaattcatctcgcaaattagtcgcaaactgtgcaattatatattttttctatgtttaatactatttacatgtgtccaaacgttcgatgtgatatgttgtaaattttttccctgggaactaaacacaaccatatcaaaagtacctaggaaaatgtttcacagtggaccataaatatacacttggttcagtgtccagacacttcacacgaccgcgcacaagcatccggccattaggtctaccctgtaaattgtggtaaaacacgcaattgttacaaaacaacttctaaatctgatgcattgcaatcggtatagtcaaagtgagaaagaaaacactagtgaactatttcctccgtttcacaatgtaagtcattctagtattttccacattcattatggatgttaatgaatctagacatatatatctatctagattcattagcatcaatatgaatgtgaaaaatctatcttgatgctaatgaatctagatagatatatatgtctagatttattaacatctatatgaatgtggaaaatactagaatgacttacattgtgaaacggagtactaccccaggacgtttactcctacattgcatacggtcttacatcatgtaatattagaattgtttttctcatttcacatgaccaaaggccatcagcaatgtggatagacaataggacgtcagggcatataagagtttcatagatgctaattaaataagtatggtaaagaatggaaggctctgtttggtaaacctctaactctaaaatttagttttaggagttgtgttcagagtggagttctagagcagtcaaaacctagctccacatctctagttcattttgtgagagcactctacccagctccactcccattttaggtggagctgaaattgtttggctgagctccaggaaagatagagctggagctgtgtcaaacagggccgaaatggattataattctttgagaagatgttttctcctgtcgctcttatatgtcatctaaatagtaaaattatgatagattaatatgtgatatatcactttataaatatgtaagtttaaatttgatccccataagttgtaacaaaaataaccaatttaacttaaactagtacacacaagcatatctatttattttaacttatagaagtcaaatttaaacttgtatatttatggagtgatatattaatatatcttgccaaatataattatcttaattcttcaaaactatttatttgataagcacgatacgatggaacatccctctatgggttaaaagagtttcctgataaaacatgcaattgttggaacaaattggccgaacaatcatggcaagggctcccacccctcattggagagagcctaaggttggatataggagatagtcaaataggaggagaggagggatgagagttagagtaaccatatattcatgggatggattgggatcccccttgtctctggagggccctatctattcattgacaacggaaaattacattattgcccttgactcgttacatgagagtgacattgctctaggggtgttcaatcctctatctactaacttattaaataatagaaaaaaggctccacactttctctcacgataaagaaattctcatattaatcaagaataagaaaaaaagggagtccataataaagtacaatttaaaaatagctgaaatttgaaattaaaaataagtaatattggaagaggaaactagagtccacattggtattcaatttagaaccaagtgaaatttagaattaaaaataaaaaaagtaaaagtaaaggttagagtccatatagaaatacaatttagaaataacaaaatttcaaaatttttaaaaaatattggaaaacaagtctagatttcatatagaaatatagagtgtatttagttcacgtcaaaattggaagtttgattcaaattggaacaatgtgacggaaaagttggaagtgtgtgtgtgtaggaaagttttgatgtgatagaaaagttggaagtttgaagaaaaaagtttggaactaaactcggccataatttagaaataactaaaattaggaattaaaaaaataaggaatattgaaagatgaatttagagtccatataaaaaatacaatttagtaataacgaaaattcggaatttaaaaataaggaatattataagaagagtctaaagtctacataggaatttaaaataaatttggatctaaaataaaaatactaaaattgtagagtttaaagtccctatagaaatgtaatttagaaataactaaaatttaaaataaaaaaataaatattggaagaaggacctaaagtctatatatgaatataatttagaaataactaaaattcggaattaaaaataaaaaagtattaaaatatgagttcagggttcataaaaaatacaattagaaataataggaatttagaattaataaataaggaatattgaaagaggaatttagagtccatatataggagtactatttagaaataattgaaattcaaaatttaaaaataaaaaatattgaaacaagtgttaagtgtttagaatccatataaaaataaaatttataaataatgataatgcggaattaaaaaataaagaatagtggtgtcatggttatggatactacatacctaatagtagttgactaaatctcggcaggacccaccacataccatgtcctatacggaaaccgacttcagatatggagggagttccggataaggaaagacaaccagagttctacatggaaacgacaaggactactcggattgtatccatattggtttccctagttctacttggacaaggggacacctatgggtataaatacaagcccccctaggaggacagggggacagacactcaccatgagacgatcaacacgatcgacaaccaccatgagacgatcaacacgatcaccacgatagggacgaccacctcatcaacacccaacacaatcaacatacaagcctacatacgccaagacacgccgccggatatcgacttcagggataggcatggctattcccctacggtgtctccggataccgtcaggagatacgaaagcgctatctctgatctcgtcgggcacggattcgaggaggaagactaccttgttgtcgactacgagttagaccttcaaactgacatgtcaacaacagttagataggctacccacatattgtactggtgtgattatggtgaataagagcaataccggcttcggccaacaggatgtaaggttattacctaactactcaggggcccgaacctgtataaaaatccatgtctccatctctttacctcagtctcacatatatcctagcaccaacgatccccatactgtccaaataccgtagtcgtgacatcaaacgtcgacaagtggaagtagaggttagagtacatgtagtaatacaatttagaaataactaagatcaaaattgaaagtaattaataactatcacgtatgatcaatttagtaaataatttaaaactatgttgctattttaataataaaatgtgaaatatatatatatatatatatatatatatatatatatatatatatacacacacacacacacacacacacacacacacacacacacacactattatataagaaaaaaaagatacttttcgcgcaatttgcatgggccatcaatagtgtagttatgttattagttaacacgataagagcaggtacaatagtagactataagccaggtataaacatattttaatgagataaaggaagagagagaagagcagcgggctacagatttgtagccagctatagctaggtgtaggactaggtattaatagtatagtaagcaactattgtatgaattgcctattacattggttatagatgattcgtagctagaagttggctatcctattaaacttgctctaaccctaagagtggggtttatccctaacacagtggttaacactgaatgtggaacaatatatatacttaaaaaatcatgtcatcctcactagtcttgagccaacgcttggaaaacaatagtaatgattttcatttgtttcaaggtccaaacctggacctggtacagagtaaatttgacgcatgcaatgggtagactgtagtgtgagaaagaaaagaggtcttccgccctcgcattgcacatgacctaatcggttctactgtacactcgtaacagtagatgcaagatgtgctagctggtgctcgattcggactactggtaactaatgtcatgcgatcattgtccaaggccagtcctaacttaggtctgtgcctgagaagtaagaattgatcacatccacggttgcagggttcggtgagatgaccaatcgatcgatcattgtagatgggactaattatcgctgctgataatgactctcaggcagctgatgggcgccgttcgcgtggtgattaacctgacggcacgccgctgtgcggggtgaggcaatgaactcgtgtaccttcatgctgataataacattttcctgacagtcctgctctcaaaatatcattgcatgctgcttaattcagattgcccgtctttgaccgttaaactaaatgcaaaaaacatggagagatatcacattggacatgctgtcaatcagatgggcgccatacgtttggactctgtattttctagtgtcctggttcactggttctggaatgaatacaattacacaaaccgtcctttgtaatgatatttcgagaaaaataaacctccgctaattatttccccccagaaagctacatatatatgtcttcaggctgaatcaggcagacgcctctgacgaattccacgtacgtcctgatagatcgatactactaacatctgagctgagatagctatggtccaagctttgcagcgcattggcagtacggcagatcgattaaacccagcgaccgtttggaatcctaaagggcatgcatggtcgacggctcaagataaccaaaggttactagctgaacaatcctacccgtcactgcctttatcacgcttaaaaaaatataaaaaccaaaacgtgcctgttcttatagctatactatgaacgatcaaccaatgcaacgtaagtgcacgcacgctagcttactgctactaaccacatgcatgctgcatgcatgccagaatcactatattcactgccgtgccgatgataatacatcaactaacccttcgtgacatgtggttaggccaaaagagacaacccctgatccaatcgatcctccctctccgaaaccgtgcgcgaaacgacacgcgcgcatacatgcacagcaacgcgcggctcgcgagcactggcccgcgcgcggcccacgtacgtcgacagccgaatcccacgcgatctcccggccaggacggtcgcgcgcgcggggaggctaggcttcgggcttcctttttccggttttcccccgcttttctcgcggccgtataagcggaggagaatatcaacgcgcacgtaggtgtacgcccgtactactacgcctctctctctctctcctgtggttggcatatcgctcgcgcgcacgcgtgggctttggctgccatgcatccgccctgtcacgctccactcaacccccccgatcggctatcgcaagggctgggcctacccgatcgtgaccgttccgaggggcacatcgccgtcgaccatccaatgcccacgaccggggcggtcacgcatccatccatccacccccttgtgcagcagcacgacagctactactttggtaggggtcctagctatagctactgctccctgggacgtggtacgcgcttctgctcatggacggatccgcgacgactgtgatgctgccatgctcgcacgctgcgcgctaaagccgcgggccacgcgagaccgcgagagacacgaagaagttgggccaactgttttcaggtttcctggtcacgacccccatgtgtgaccagatcgcgcgcatgcagcatgcacacactccgccggctcggcgagcgtacagagctggctgttcccctgttcctgttggtgcaggcgaatcgattagttggttcgacttccgcgcatatgtgttcattgcacgcgcgggcaatgggcgatggagggactagggagccgcaattcgggagcagggtgtactgtactcgcggtgtacaatggtggcgagcagcgagatcgatctatcggcgcatcccctttctggtcctgcacgggtagacgctcgcatagttcaagcgatcctgacctaccgtttcctctgcacaggtcgtccctttaggctagctaccttttagcagagtttagtgtgtgacagtgtgttccctgtcatatggccgagcttttcttgtgtgtgtgtgtggggggggggggggggggtttacagttgaatgtacccaaatgttcttgtcggtaagccagatatgatgatcgggggaatataggccatccatacgacgacatattgtcaggtgtgtgtatattgtgagtcgttatcacttttgtctgcactgtactagtgatttactcctacgtgtctgcagcgctacatgagctgcattttgcatgactaccatgaaagtgtgtcgacaggtccatatactgtgtatccagattaaaacgtagtagtacgagtgactatgatatttgctaaagaaagcaattgcattgtgctttccaatgcatttgcgcacttttttccttttaagaaaaatgcagaaatgttatctctctctttttttttgtctttttaaaaagacatagatgcgtgcactaggagggctggacgtagaagccttaccaggcatacgtccaggactctaggcgtgcaaatttttcaggtaagctaatccaatcaatctttcctgtgcgttgcgaccagatgagtagcaagcagtgggtgaataaaattgctcgacagtgattacagatcggtttaactaatggggattaggactttccaatcattgctttccttccgatttccctttcgttgatgaactgcaatcactgcacgcctccatattttagcataaaggcatgcgtgacacgcagctacgtttttcaggtaaccaagctcacgctggttaagtgcattctagatggatcgcctgacagcggctgcagcctactttataattcgaaacgacgactgatttatttcaaatcgactttcgctttaccatactttcgtgattaatgaaataaacaacgctaaaaaaatcttctagacctactccagtctgtcactgaaactaaccatagaattcgccttcgatcttctaattatcatcagctacacggctagctcagctaggcatacctgattcttgatgtaaacggtatgacaccgacatacctaattcttctcatactcccgccactttacgtggttggctatattacagagtttacctctcggtctcattctcatatatgctctgaaaaaccaacgtgacgttcctatcattgcatttgcagagggcctcctttagcaggacgtcgcgctccgattgcgcccccactagcgcagctagctaccctctcgatccccgtcgcctttgtccaccacgcgttcgcgcggggatgacgacgaagagtcgacgacggcgaaacgactgcaggggactgtgtggcagctccccgagctgtcgctgcagcgagtccgacgaagaagagatgcgatgctacgaagccaccgaattttcagccagcacggccgtgaactgaccaccgctgctgtccggcgggcagcttgcttgctggctgagaaatgcacgtcttgaaggttgcagccggggctaaagtgccacactggcatgcataaacctctgaaattctgatggctacagccaactaacactgcctccccggcctatggccatgatctttggatgaagcctggctttagtggcttccatgcgatgcagagagagtgagataagccttctcgagataagtagggagttgagagtgactcatgtatatgtgctgtggtaggtctgcttgctactttatttttctccccctgatctaattaatggcttcctcctgtgcccggaaaatgacatggtcgtttgttgttatgtatactgagcatgagcagtgaacatctgaaggattttgacggttaaaaatgcgttcatgcgtcgtggagaaacaactgtagcagctcgttttttccccccaccacttgtctcgaattcactgtaccttgccaccaattcaactttgatttggggtcatgtagaattgaacaacttgagataagtcaacagtggtgactacctggaagcaaattccttggtctgaaatgtcccggggggagagaaacagaatccagtaatatcgtggccaaattttaaggttaggtgtgttccctgcctcttcctgatagcctttttcgattatcagaattcagaaaatgatcgaattggggtagataaacagagctacaattaaactggggcagtgaactgtccaagtttgttacctcgaatcaattttcaacgattaaataccatgattgcttttgacaaaacatgctactagaataaaaatggggcttttgatttgagtgtgtggggactatagaaaatagtgcatgatctgaagactttcagtatcgtgggtgcacaagctccacaaaaaaccttttggataggtcgtacagtgtatgacctaaaaattatctggttcactcctcaacaaaacgtggtctgaagcaacttgccaactcgccccttcagattagtcatgattgtgcagtgtcaactgttgatcacttgttctcgtgcccataaagaaaaaaaatgttgttcatggtcctatgctgtttagtggaccatatcccgaatgtttttcatttcacattttctatgcagagcatatactagtattagaataggctgaatagctatcgtaaggaaatagatgtgaaaatgatacagaaatatcatatggtgattctgtaaatggtattgtcctgtagacactccatgtctccatggcagcggagtacacaaacataaaagcaacggtagtacattacaagtaacaggtgaataaaatgagcatgtaaattagaaaaaaaaatccattttactcgcccaaactaattcaatagaccatttatcctctcaactattttttggctcattttatatatcccctaaactattaaaaatgattcattttactccttaataacatttttttactcattatacaagctgtattttaagctgatattgttagagccatagatgacaccattaccaaagtttaaaaatattttaaaatttttcatggtgtttgctcgaactttagaattttgatgtttaaatcagtttgaagtgctttcaacctatgtaaacagtgagggaaaaaaatcacaaaagaatgttgacgtaaaatatgacttatacagggagaactaaagaagagaggtagcgttggttgggggggatgtgaagtgaaccattttcaatagtgcggggtgtaaaatgagaaaaaaaagtttaaaggggctaagtgctccaatgaaatagttcagggagtaaaatgaactttttttgtaaattaataaggaagaaggaaaaaaagtccttacgaggctaacatagttgaagtaacaacgatttattgttacccaatcagattgtttgtaggtggtggagatgatgcaagatgggggtttttcggcaacaacggttgtggtaattttctatgaatgccagatttttgatgtatgattttgttaaagtctctgtcgagtgttgtaatagggaagccaattgtgtagcacatgttctaggtaatcatgcttttaagtttaagaattcttgtaattgggttgatgaggccccaattttcttgtggaacattccagtgaacgatgtaactatgtttgtagattaataaagcacgctaaatgactttcctaaaaaaacatagttgattgtaatatgttgtattacagtgcaacacactcaagtcatttgtgcgtcagagtgagccgtgtacgtagcgaaaagtgagattgactcgtggcgccgtcctggttgtggtcgtggccagcgcgttggcgcaggtgtgcaacaagtacacgcacatccggggctccgggccatgcgacgcgtaatgattgaagagggcgctgccaagacgccccctgcatctagcttcgccagcctcacccgcttccacttccacgactgttttgtccaggtgagctagctacactaagccatgcctccacacaacggcacggcacgccgagtaggatggtctgacgagcttgggaaagataagtgggggataagagaggaggaagaagaggaggagctgataagtgggtcccacagttttttttaaaaccttagtcatttacatgtggtcccacttcaatttataactaggttgtcacatcaacataggtagatcaagtcaacatgccacgttagcgaaaccaccctaaaaaatatcaagggaatcaaattgtactggttttattattttttttcgtgggggggtcaacatatgcaatattgcgtttgagggatataaatcagattggccctacaattgaggtagttaaattggacttatttcttaagtcatccctagtgatccttacagaaaaagtcttccctagtgactagttagccaattacggagaaattcaccctgtacactgaaatctgcagaaggaacttctatgacatttcaaagtttgagcccggaagcctgcaccagtgtctacagaatatcttggcccaatggaagtggcccatgtgaagagtttcgtttaaggccatgtttgttttagcttaagattattgtaatctaaattattaaatcagattactctaaactggattataataagctgacataaaataagctgtgagttgtttgtttctatagattattacatgcatgtaagggtaatgagtctttagtcacttaataatctggaaaaagctcctccaaaggagattattagattataataatctggcttatagattataataatctatcaaaataatttacttgtttgtttcaatctacttataataatccagattataataatgctaagctgaatcaatcagggcctaagttaaagccaacacataaattaaagagtggatatgccactaagtttgtcacatgtttatgatttatcatttagtcatattctacaatacgctatcggcttttgtttaacttcgacaattcaacatcatcgtctgatgagcctccattactaatgtacaattttatccaaattaccaaaacacccctaagacaaaaagttacaaaatttggatacaaattctgaaatatcaaattttaagtttttgaccaaattttggatgtttataatcttatgtttataatatgatatcttggaatttttgtccaaagtataaagtcaatagcaaatcgcatgtgtctataatgggttctctcttggaagcatttcttcctttttcttccccaaatgaccacatacgttcccccacggtttgtgccccttaattcgtagtaatttcaatagatttacattgaaagcacaccttttcaaatatttatattttgggttatcccttttatgaaaagaaataattaaattgtaagtgagatgtggaagagtcacatccgtaccttagagctaagccatgcctgtgttaaaccatttataaactaaagtttttttaataaaaagtgtgcatcaccataagcatgagcggaacatgagcctttcgtgaaagcaacaggcaacaggcaacagggcaacatggctaatgtcataatgtttgtctgaatcatctaccattttgacttggaaatggagttttggctggttgagcccagggtggatttagacagtgctttagcttggctatggtcgtgtagtaataaaatctatctttacagaaaaaaaaacacgatacaaaatgcttatgctcatatgtacaatttaaatgcacacttacacacatacacacacgacctatttctacgagtgccccctcccttgctctgctggaagccacctcccctacccatcggaggccaccggcggggtgtctagggtcggatctacccgtggggtaacggatccgcacgtaggggtgatagtttcgatcatgacgactggatctggcctgtacaattaccggtcacccaaccacctcgtgtcgtggccgttgaccgatcattgcaccgccatagcagcctcgctcactttgccttgctctacgccatccattgctcgcggcttgctgctatgccgaccgcatctcctatgcgagaaaacgacgctaccatcatggctcgccgtgcggttggtcggtggctcactctgacggcggtgaggtgaaggtggggggctgggggaggtactttggtggctagggtttccaccccgagccgcccgcctggcgggacgacgtgggggttagactcactctatatcatattatcatattataagctgttttaattttttttctcagtcaactttgtttttttaggtttgatcaaatttattaaaacttaataataattataacattaaatcagcttcattaaatctaacattaaatatctttatatattatgtttgttttgtattgaaaataatgtcattttttaaaatttaatcaaatttaaaagtttaaccaagaaaaaaaaaatcaaagtcacttataatatgagaaacggagagagtattccgtttatcctcgaataattgttatcatctcagtatcattacatatattatctactcctatcaatacctattggtaacacaccggccaaaaatcattcacctcgatggaaatctgagaggcccattggatacttaataagctaaactaaaaaccaaaatttgaattttcagacataattttaagttgatcttaaaatatattaacttggtttttttatattagcttttaaatcactaagaaaagatataaattaatttttattttataataaatcattttagttttattagaaaatatgggtaacgagggcctcaacaagaaacaatcaaacactcgtacataccatgtggacttgagaaaaatagtttagaaagtcattccgacaagctaccgttattatttcttcccgtcacaatccaagtagccttcctcctcttcttcctcctctcgcgacggcaacaaacgattcacttccccattatttttccttacgctctccgcctctccgccaaacacgcccaaaatcgtcctgctcctcctccgctccatctactggatccgcgcgaccggcgatctcccccgaacctcgactgatctactggtgacgaaccctaataactcgcttgaatatattgttcggagtttttcttttcctggtcttcttgagcagtagtataatcgatactctgtagcatccatcttcgtgcggatcttgtatgctaaagttctcgagtagtactagcagtttattcatcagaatcatcaggggttgaactgaatccccatgctgtaacgttaggtccgcctcttgtttggtgaatcaattcatacctcgattctttcagggtgtgaatctcatgtactagtattgactagctgtagaaggctattcatagtcatagctttactgttggtctaagtttggtcaacgggtactattcttaggctttcctaccgctgtttctgcgaatggttagcgttgaaacgcagaattgtacaatctttttttgcgaataggttatcaaaccaagttttgatcatttgctggcatctataaagctaaactgacttccttacattggaggttggtggaagagccagcccctaccttcgttagagttccttcaaggagctaactctaatgaggctagaggttgtttcttgtaaggtgataggttggtactagtaaaatatagaatcctttgttcattcttgtccttccatcacagtcgtttctacagtttggaccgctttccaggtaagttcttttactaatgtccagtgttaagaaggtggtttgtttgacggacctcaaatcctcaataaaggaacatttgattctgaatatatagcttagacagagatttgctcagtaaagctaatatcagttgtcaaggcgtattaatttaattttgtgcttactgctaaaataatcagcacaactaatgcatatttagatgttttcaccattctcgcttctacagtccttttcagtggtagaggtgaaatgaaatatagagctagaaagtttcatgtgttcattcttcaacagcagtttaaaaagctttgttgtgttgcctacgtattcttgcatcataatgcagagtttctgtatgttctccttaacacagtacaaaaacaaagcattttctccttggtacagtaatgtgcaaagcttttatgtgttttcaaaaagcggcgcaagaacgaaccatgcctgggcgatgcatgcatgactacagtttgggctattgtggcaggctcagttctctcaaaacttgatttctaaaggaatctttgttattcccgaaacctatatttacctcaattgaccatagatggcaacaaaagttggagcaactgggtcatatatgtatgaaataaaatcagaaggtcaaattctatcaagtcatatgcatgatctcactgagaatctgacaactacctgtgggtcttcttaagttctatttacgcgatcagtcactatgtatgaattccattatctaaaaaaagacacaatgtatgaatatgatgccttgggactgatctcttggttgttggtgctgtattaagtaaatgcgtactgataatttcatcaaagacttaaaatgtttgataaaggtgcactgtgcatcttcattctttgatctgccaaatcagcaattgatgtgttagcttggcactagagctctgggagaatcactagtcaaaacttgctcgtgtttcttggttatctcattcattactatgttcagtacatattatctatttccttactgttgatgtttcaagtcttgagagttaggatgaccccgagacaaagatcaagagttctgacatccttccttttttacatcaaatgtagcctttgaccgatggcatcgcctgcagcgccaacagcaacggagttcactcaggaagctgctcgtcagtctctcattgagatctctcagtccctcccggagaaaccttcagcccagaacctggaggtgaagtcaccgagcccacgtgcagcaaacgaagatcatgaagatggagcagagaaatacagatcaaagctgatctcaatctcctacctttctccggatgcccaaccgacgccgtgccctcccaagaatgtcctcacttaactgtgacgatgctcctactcgtgcgtgtgtggcacagtatatcagtgttatacctcacttttagctggaaagatggaaatggaatacttttgggtgcttatgtttctaaccctaagaaacattcagggggaaaaaaaagaacagatagttgtacagatgactttgtgacgaagaactatttaccaggaacaggcttgcttaatccttgcatgttattttgttgttgcataagcttagttgtttccttataatgtatggttattcgaagtgctacattttgccctctttcagagtgaaaataaaaatctcttgcggttatgaacgacctgctatgaaacgaacactggcacgcagtccaattgctaaccttgttggtctcttccatgcgccattcttggtcattggaagagtatcaagcacaacgactaacctcttgccttatccatctactagtattctttctgatttagttcaactttgttcagaaatacagaacgtctgaacaatttttgtttcgagatttgtaaacttttctgaagaaaagggaggcgaaggctcggttaattcaaaggcccaactcataagaagcccaaccagcccatcaaacggtggggaagtgaagtccaacctcctggcgatccaaggcccaaccgatcatgcattcacgccactcacggtgaaccggcggccggccgatcggcggaggatggcggccgcggcgggggactcgtcggagccgaaggcgagcatcggcgcgggcagctgctggtcgccaccatccacctcggtctcggaatcggtagcatctctccgcacctctcctttcgcgcatttttgcatttgaattcggttccatccgcattgttgggggggggggggggggggggcttcccgtcggtgatcgtgctgagggaactgtagcctgtaggtccgattggctccgggagtcgtcgtcttccttgaagggagattctaccgtgtggcttacttggagtagaagagtgtctccttgagtccttttgtaccgagaggattcgtagtctacaggggaattagggcgaagtgctgtcgcttatggctgctgaatgctgaggcagagttagcgcgtgagtgcgcaggtgtactgggacaactaccccagtttgcgcgattgctctgaaaaataacgatgtagctatgcgattggctgcatagtgcatagctcggtctaaaagtgtgaagtgtgaaagaaggggaaaacccccatgaacaatacacttgttaaatcaattttcttctttaggatttcgttcttctgtttttgctttatcctttgatttagaattttatgtttgggaggttactgaattgataaatcgtaggtttattatggagtttttcttcctcaaggaaaagaaaaactaaaagaggtttggttttcacgagctagagaaatgcccaggggtcttctggctagctccacaaggtggtgggctagacgacctgggtttgaagcctcatcccttctaattatttgatattaggtacttccctaatattcacgttttttttttcacaagccagagcttgtactcagtagtatatacgaagatatatgcttggactccgtgttgaattattccatatatctactttcacttctgaattcatatatgcatccaagcagatatagaatggagtgaattctatacacaccaaatatatttgaatttgtagtgagtgaattctattcataccaaatatatttaatgttaactgaaaatttaattgtgtttgatgtatgcagacatcactttagatgtagagttcttgtgcagagaaatgctacaatttgatttcacagaaaactctgtccccgcttttctattggttattgctataagattccatgttttgcattgtgcatgcagtttttccaatgtcctttttgtactttttgtttgtcaaacttctagtagctcttgccatttttaaatttgaaatgtggtttcattttctttggaaagtttgggcataaatttccaagaaaatatttatcctttcccatcctactctgatggttgttagatggtttcaggtgaatgatgcatataaatactaaacaaacatatgtcttctacggccaaatttctgcaaatgccttctctaattgatctcctggttaatctttagttactaaccatgaatattgcatacagcttccatattcttgtcctttaatttgcaactttcctgcatttgacatcatagtagcagaccaagttttgttctgattccattacttaaatcaaagacttggccacggccaaggtagtatttccaatttctaaaacctctttgttatgtttaatctcagttctacattcattattattgtgcatattttcagagtcatattttgtagccatctgcctgattattgcatgcaaaacacattagtatttgttggaagatattttgcaaccgtaattgacatactggaagaagtcataaccattattgtttccatcgctgtataggttttattttcgcccacccatttgccttccactgtttagggaaaagaagagccttgatctcgccatgttgcatttgctttccttcatccagtggttatctgcatgaagtaacttcgatgcttacaggtgattatgcgtgtgttcctttttcctctattagttgccttggtttttgatattatcagttctgtgatatcgttttcctgcaacttggggcttagggcaggtaggataagactcagaaagcaagtattggcagtgactgaaaggtgtcctttactcttccagagttacatttgttcttaagaaatgaactttctaattgcttgtgtcttatactaaaaagatacttgtctagtttgcatttaggtttttcgtggtacatcatgttgaattccaacaagtgcgtattatattatatgcagaacgagcacttcgtgattgttcgtatggaagctatgttaacacatcaacctgcaattgcgtgcaacagtggtggtcatggaagttgtaaatgcattaatggggtttctctatgaggcctcctggttaaatccttgaaagaatgtctggtaaatgatcataatataacaattttgatgggaggaaataagaacagagcattgtggtgcaggaacaattgctagctcctcagctgctttattcttaacctttaccatcagatggtttgatagcatataatttgacttatcacatacagtatgaaagaattttccaggctagacatcaatttcctgaagttctagacatagctagagagtcagcaacaacaacaatcattacaattcagtcagttcagctattgtgagtaaaccaaattgcatggtacttatgggtctgtccatctttcgtactactaggttgtgtctaatccaggattaggttgctatattttgggatagagggagttcgcattaaatctggacttctagattatgaagttccggacgtaacacttatcaactggaatgattaaaatacctagagaactcacttattaatctctatctatcttctgttattctgccatgctgttaggacttaggatggaccaatatcatctgctattcctgcacctgagctagaatgtcttagaaatgaatatgatactagcttgagttttttttaaaaaaactgtttggtttccttcgtgtcctatctttgttattatgggcatgaatccataacatttcttgagtggctatttctaagtggagttctcttgccgccaatctttttccaatggaaagttgactagctgacagtttattgttctatggtatactattttggtatttataccatgttattttatccaaatcttttcttggatgttccaatgccaaatacttcttatggttttctaattctatatctgggacatccagaatactcataccttgttgtacctgtacggtcttattatgggtagatccctgctatgctatttcacaattaatttgatgttttggcctatcacttcatattattgttcgagacaaaggacaatttgcaaagaaatagttggtgtactattgataaattaatgcaatttatgtttcctccatgtaggttgcataagagcacagttttctgataaaagattttacaaaactgcaaaagttgcaagtcagagactcggagtattactgaagtgagtccaactcttatagaacttttttgttggtggggttcatccttcgaactataccttttgccacctctgggaatcaattatttcccggaaatatggatttgatttcttggttcctgcagctttgctgatcgtaccacaatagatctgctggcttttgcccttcaagacccaagagggctagcttgatggtacatttctttaatctttgttctgaagcaataggtcaattgtgaatagtttcttttctatgctgcaaaaggtgtaccagacttctttaccttctttaacaatgttgtagttctccaaaaggcccatatttctaaacattttcaatcttttagtccatcggtaccccagtccagcgatagacctggcatacccttaccttattctatttacctgtgttggacttgaggaaatatattagtgttgcaatcttttagccctactcccatgttgttttattctactttaatctatggttatcttaatgcagggagactaatcaagtccaagattcctttttcacggatggatggtcccagttgagtggaccttttggtgggaagcggacaaactaaagcaggttcccacttgacaccttaattttcttcaaaacaactttcttcacaagatctcttgccaattaaattgagacccagaggtaaaattaccacataatcgtcactccgaaaaaaatgtcactaacatcgatagttagtcaaaaaaaaacatcgatagttcaatatggctgacatgctaattcacaatctttgtttgcaacccatcattttaattcaactatatatatatttctctttccgagggagtaatatgtgaaagtattccttttcttcgaggtaaaaaaaaaggtaccttatcgtaggcgcaatcaaggattgtttgtttagggcatgtttaattcgcgaaaagaaaatatttgggtgtcacatcagatgtttgaccggatgtcgaaaggggttttcggacatgaatgaaaaaactaatttcataactcgtctggaaaccgcgagacggatcttttgagcctaattaatccgtcattagcacatgtaggttactgtagcacttatggctaatcatggactaattaggctcaaaagattcatctcgcgatttccatgcaaaccgtgcaattagtttttattttatctatatttaatactccatgcatgtgtctaaaaatttgatgtgacgtttttgggaaaaaaattaggaactaaacaaggccttatatcgcttgcttgctgatggagtgatggttgattggtgattggaccaatctatcatttcttcatattggcaattgattcaagtcattcatcgtttttgttctaacaattaataatacatccaaccattcttggtaattttgatttggaaagaaaaatatctacctcactttattaaggattgcactccatctacttcagatactaaatcaggtattgaagaaccacccaaattacacatgaggcagtagaggtgtttttaggtaagacctttatacttatatccttagctctaaaagccaagtctggaaaataaaaaacaactaaacaagccccctaaattgattcaaattaagttttaaaatttgctgcagctcaaattaagttctaaaaaaagaagtttactatagattgtttgtacagctggttttaagtatttaaggacattaacttgaaagtagaagtgttcagtagaccttataaattagaaatagttgatgtcttgaaatttctaggctcatgtttcttgtggtctattagtggtgtaaaagcactcaatccatttcaaccctattgaccaagtgctgtcacgtgggtccaaatatcagttaaagttaaaacctactactacttgccttccacttccctatgtcaagcgaaacaaaattttaattgtagttcagtatattaaactccgctagattcaatagattaggcttgcctcaaagacaaccactgactctctggttgcaaacagtttgtttcccatggcttggttggtttgagcagtgttgtagtaccctttaaaatttttccttgcatgtgatgcgagagagcggatgggaaggtgaaaacgcaggaacagaccctatgacccctgcccctatgcttaggtcgtgtttagttgtttggtcaattttttttaagtatacggacacacatttaaagtattaaacgtagactaataacaaaataaattatagattccgcctataaactacgagacgaatttattaagcctaattaattcgtcattagcaaatgtttactgtagcatcacattgttaaatcatggcgcaattagtcttaaaagattcgtctagcaatttacattgcaaactgtgcaattgattttttttcatacacatttaatgctccatgcatgtgtccaaacatttgatgtaatatttttggccaaatatttttggaatctaaacacacccttactggatcctttgcgttctctcgaaccatatatatccatgctgtctgtgccggatacatgcattgcgcaagaacaacgtgccataaatcattcatactgtgccatcttagcttaacttaatgcttactgtagctcattgtgatgtgactttcaaatctgatatctaatcttaagagcaagtttaatagtatagtcaaatattagctccaaatcatctataatcaatttaatagccaatctatataatagttatctataaacatatactacacttttaatatctacaaattgtgtcttacagtccgtgttatagctgtctacaaatttatagctccctgctcttctctcttctcctttatctcctcgaaatatgtttattgttggcttataatctgttattgtgcctgctctaacattctcgtgctatagtattatagacacatgtcttgactaattttgtctaaattatagcgggcaatttgattaccgccgttttttaagctatacttttatcttatcagttatggcattggccaaactctccacgataattattgcctattggaacctggaacattagtagcgtagattgtactcctttggaggaatcctaacttatggttaaacctcatggaaaattcactttgtgtccatacgtggttgaatagttcttttgttttacaatttctaatgactatagatttgacacttcaactcttgtgttttcctaatcccgtttttaaattcatgagtcccctaacatattgttgtgtgttccacacagcagaacaaagaatcaacctgaattactgaactccaccgtaatagcttaagtgactataatttttcctattttcctgcgcactgtatgctgtaccaacacatatagaagtatctgtttaagccattgacaacaatacatgaagcatcatagtctatgttaaagttagccgtccttcttttgcctgttcagatgctaacaagctgtttcgtcaaagattggttcctacctgtcttccccgcaggtgaagtcgctgttttttttccatgcaactttgcaatcatgcttttgtcttttgcctgttgagattttcagaatggaacttgggggtaagtatcaggttagcagcagaaaacaacggggccgcatttcggcacactgcatccatcaaggaactgttgagtttgacttgccaggtacccctcttcttccagaatccaatgccccttgcccttgaaccctttatttttatttttgaaacttattgaaccctttattagacgtgctttcatttcccgtcttctttcatgtgaaacacccagagaatatcatcaggtcatcaggagcaacttttttttttagggaagtcatcaggagcacataaatgttttatcaagaaagccattttgcatagtataaaaagttcgaaattaactgttaacatatattgtagtaaacgaatgttagcatttggtagtaactgtcattaaaattaaattaatagaattttcactgattttttttctgttttctggatttccttttctagcaaaacttatccttgtgaattctagatctgtagattttttttttggcatttatctcaaatttaatctatgtgaaaggttttattttagatttttgttgctgttcaaatgacttattctaatggatttttacgagatgaacttttattatattagtagtgagctataaaccaactataaacttatgtgtaagagaaaaacaaagaaaatgcatgagtgttggctcttatacaagagaaagagaaaagcttcacattaaattcatagtaagaaaaagattcagacaaaaaatagagcaaactttatagttaatttattatacatattagctctaacatggactaatagctaattgttagctctattattaaacttgctcccatgaaacaccatagaggtttcaagaatttctcttcctcggtgcctctaatattgactgttgccccattcagtagaagagcctacggagttattgcagctgcagctacaactaggcaacaccattctagaccctcttcattactgcacatgcaggactgctcactaacatgtgggaccgatggtcagtggacaatgggacacatattattgttggcttgtaattgtagtaaatgggtagccgaataggccctgtatagaatgatagaataatttttgggagtagattacatgcacgtgaaaatttattaaacttcagtataactatcgttttgttattatatatgggtttagtttaattttgatttaagtttgaatgctttttccacgtaattttgtatatttatgaactgtaagtttatttcatgtttagggtataataatctactgctcaacattttatgaagaaaaaaaaaggttctcttttaaatgagtaagtaatggagtaacggaaaccattgaatcctcatctactccctccgtcccaaagaaaaacaaaccctagtttccatgcccaacatttgaccgtccgtcttatttgaaaaaattatgaaaaaaattaaaaaaacaagtcacgtataaaacattaatcatgttttatcatctaacaacaatgaaaatatgaattataaaaaaattttatataagacggacaatcaaagttggacacggaaaaccagggtttgccttttttttttgggacggagggagtagatgagaacttttaaaaatttcaagcacctgaaatctgatactcccataattctttatttgcgccgtgggccctctcatttatttttttatataatatgtggaaagaatattctatccttatttttttcgctcacaggttttctcttaattaccttttttttctcttttttttcgatggtgcatgaaaatactagtactatcttatactgtcgcttttcctctttctacgagtgtcagatatggtggagttcgagttcccaatgcttcagttggcccgccaaagccatccaatttgccgagacggacaccccgcgcgcgacgccacgccaccgcgcgcgaatttacgcggttgcccctcggtggagtccccttcgccgtaattagcccctacaaggaggggcagtctcggcgcgaaacgttgactcccctgcactcccccaatcccctccacgtcaacacggccctgccacgtcactggcgaactcttcccctgctccccggcgtgagcggagcaggtgcggacaaaacggcccctccaccatactaccagcaccacctgacaatttgcgttctcaccccaagttaaactcgtaattacgtgtagccccctcctaggctcaccatttataggagattttttttttcaatccggtacttgagaagggttggaattaggatttggggttcttccttggtgcctggtaatggctaaaataatccggcctagcgcacggtgcactcacgaacgaacgactgcctcggccagtgggggcgtactggtaagaaaagcccactcgttactcgttagtgctgcctccgcatcatctgcttgctacgctttcctttctcctaagagcattcccaatagaaaccacggtagcagtggtcttatatgaaccatatagcctaagagcatgtacaacagcgggctaaaagtcagctgtaaatatattttaaagagataaatgagaagaaagaagggcagtgggctatagatttgtagccagctgtagcatggatttcaagacatagtgtgtgtatgacaggtgggactagatattaatagtgtagtatgtaactattgtatgaatgagctattagattggctatagataaattggagctagtagttggctatactattgaacttgctctaaaatcatgctatataagagtaggacacactacttctattgaaggttacttcttaatccccccgtttcataatataagcatttttagagttggacacggttattaagaaagttggtaggattaaatgtgtgagtatagtattggaggataagtagagataggtggaaaattaaatagtgtagggttataattggttgaaaagagaatattagtggagaagttatattttatgataaattttaaaagctataagttgttatattttaggacggagtaagtaaatattacgaaatctgaggatactttgcgaagataagcccatcccagcccacaaacacaagcgctgttttcctctcctacccttttctttattttattcggcccactccccctcctttttctcgtctcctccgccccagcgcccggcgcctccccttctcttcaccgccggtcgtcggcgctgccgactgcgccccacgcgccacgacgactcagccccaccgcgccgcctccgactccaccccatcgcgccaccgccgactccgcaccaccgcgccgccgactccgccccaccacccgtcgcctccgctcttcgccgcgccagatccggtgggccgcgccgtcgactcctccccacggcgccgccgacgactccgcccctctccctccgcccttcgccgcctctctctccctccgcacggcgagaggtgcgcgcgagccgagccggagggggaggggagggggggagggagcggcggatgccatgggcagcggcgcgtcacggctgctgaccgcgtgcacgtgctcgcggccggcgccggcgtccgtggacgcggagccgtgcctggacgacgctctcggccactccttctgctacgccgccgccgccacggccaccgcccactcctcgtcgttccgccacggcatctccggcgccgcgctctccgccaactcgtcggtgcccgtcccgctctacaacgcgtccgccgccgccggcggcgtggcgccggggtactcctcggcattccacacctcgtcgtccttttcctccgcgccgctgcagctgtccaacctctcctcgggcccgctgttcctctcgggtcccatcgaccgcgccggccagctctccggcccgctcgaccccgccgtgcccttctctggcccgctccccgcaaagcctcccaagcccgcgtcctcctcatcgagggggttctcgaggaggttccggaagccgtccttcggcagcctgcggcggagcgtgtcggagaagaaccgcccgtgcgccgtgccgctccgccgcgacgacggcgtgcagtgggcgcacggccgcgccggggaggaccgcgtccacgtggtggtctccgaggatcagcggtggctcttcgtcggcatctacgacggcttcaacggccccgaggcccccgacttcctcgtcaccaacctctaccgcttcctcctccgcgagctccgcgggatcttctacaaggaggccgacgcggacaacaagaagctctggcagtttctcgtggacggcgacgacgacgacagcgagctcgacttctcgggctctggccggttcgcgctgtcactcgacaggctcaaggagagtcggtttcacatgtgggcgcacgccgcggccgacgagagcggcagggaatggggttccaggaggttggcaccggcgcctgcggtgagggaccatgcggcggtgctagccgctctcacccgggccctggcctcgacggaagcggcgtacttggacatgaccgaccagtcaatgggaacccatccggagttggcggtcaccggggcgtgcctgctcgtggccctcgtgagggacgacaacgtgtacgtgatgaaccttggggacagccgtgccattgtggcgcagcgtccggacgatggcgacgatggctgtgtgtttggaaccatgcggcggatggaggacgtcggggtgggcttggagatcgagacaaggcccggcggatgcgccattattgggcttaagccactgcagctgtcgactgatcacagcaccagcatcgaagaggtacattctcgttgacataggggaacaaatgcttacacgtgtttacatgcaattgcctttcttgtatccattggttggcacaatggcacgggcgtatggggatgctcatgtcgttgtttgggaacaatgtgctgacttatctgaatgcgtctgcaatatgactactatcctcttgcacttcaaaagccagaccattgccctttttcacttttgctttttatatttcagtacttcatataactagttatggtaagcattgttagtcgcttcctttttttatcattatttttatggctatgcattaatatcctttgtgttggtctgcaggaagttcacaggatcaaacgtgaacatcctgatgatgatcagtgtattgtaaatgatagagtgaagggtcgcctaaaagttacccgggcttttggtgcaggctatctcaaacaggtaattgtgatactgtttgagtgggtcagccattcttttaatttgattcttatacttacgatgtttgttttgtgtggtatacatatccatcttcagagcaagtgcatttgttgtcagtactttgtacttttaactagaaactatatctgtcatgtgttctgattaatccaatgccctgattgaattaatatagacactagataattcttgatcatagaacttcgtgtatttgtgcaggcaaaattgaacaatggattgttagagatgttccgcaatgattacattggtgatacaccgtatatatcatgcacaccatcgctttgccatcacaagctcactgcaagggatcagtttttggttctttcttccgatggcttatatcagtacctgagcaacgaggaggtagttttgcatgttgagaatttcatggagaggtttccagaaggtgatcctgcacaaagtttaattgaggagcttctctctcgtgcagcaaagaaggctggtaggctctcttctataccatacctcttgcttatttcaattcctgattgattctcgggtggttttttttgtcattgtatataacatcatgcgtatagaattggatgattatgtgcaaacattgatttgcctgcacatgtttgtctcggttgtcaaaacttcctatatcagtccatggcatgtgaggaacttctttatacttttaccaatcattcttgacataaagttctgtttgatgaaatagtcagatactcatgcaactccctcaagtttgtgatttgataaaattctaccagtgtatccttggcttattgcattgcccacctgtatatgagaccaagatacactttacacttttactacatcacaaactccactatggcttagagtgttagagatgattgacattgtcctagcttaacaattatggtttctcgaaactgtttgggccagtgagctaatcagcctgcatgctcgcacacttggagcatctgtccctcttgccaagaaatgaactacagctggattttgcaaactgggtatactgtttttcagcactatgtgtcctaaggtgcaagctggttaagcaaaacaaattttgcattgttggtgtaaagaacaccatggttcagttggtaattttggctctactgtaggatatttttgtattgattgttatgaacaacttgcagtcatcatcattggtacacgtttgtgttgaatatttgaatttcaatagatgaatgtcttgtcgaaacggtttccagttgtctttaatgtcaaatacatgtacctttttttttctcctttctccctcagtaataccatgatttaacttttacttttgtttctttaggtatggatttttatgagttactagatatacctcaaggggaccgaagaaaataccatgatgatgtcactgtcatggttatttctctggaagggagaatctggaagtcgtccggaacatatgtgtgatgatcagttggaacaatgtcgatgtcaatatttatggtgacgcatcaagtgatctcagctggtcagagcctctgagcaactgcatttatgctcatcaggggagaaacacccacagatggctgacagatgatgcactccatacatttgtcaaagcgattggagttggagccagcgttggtctagatcttagcttcagcacaaaacacagtccatgaatgtgctagagagttaattctcggttggaccaagattgcagagagagatgacacatatgaggaatccctttgcaaagcagagttaagaacactttcttttgtgacccgcttagttgattggttacatactcacctgtgacaattccctcacccccctcccccctagctggctagctatgctgcatagagattgacacttctttcatttttggagaaagaacgtctttggaaggcgccgttttcatgttcatgtcaggaatgggaaggaaatgtaatatgattggatattcatggtgaagaaattgaaaatgtgtccctcatgtggtgctcaacatcgttttcgtaaagtcctgaactcctgatagtccattggtattttgcgtgctcgaataattaggacagcagttgttatttgttcggttggtcctatatctactgttgttcgcagttgcctggaatgggccgtggtttttgctggctggatcgatctctcttggtatgggtcgacgccagcttgttttcaaacaaattgcaagtgctatccatttgatgattcagtcaacgattcagcaccgtcgaccagaagatttctaacatttgattctgatttcggtatcggctaagcaagaagtaaaaggcaaacttaacgctccatttggaatgatggcaatttgcatgaatttcatatctgaaacgttttcacttcctgtgtttggcgtaaagctaggtatatttataagtgacactctgagattacaaatgtgtgcactcaattctgaaactgcatgcttgttccaaccggatttcccagctcaattcaactttcaaccgtttgatctgaaatggatagttgcaaccgaactccataagattgacctgcagtcatctatgtaatccattcatccccagtttcaaagtcattgcaaagatcaggtaaaccttgtaacggaggaatcccaagatgaagatatcaaatctttgagatactctagcctatggttggatctttaggtaacaagaaatttacaggagaaatcacttgtacgactagcacgatctcttggcagattagtacgaagcatctgatgatatattataatggctttacgatcggtgataattcttaggatgcattttatatgtgcattagtcaacgtctggaatgattcttagcgatcatgagctgcgtttaaatagtcctttgataaattttttttcaaggatttgaaagccatctgcttgtgacgtacctactggctactgagatacgaatcgcattacagggtcaatgcgaacatgatctgagaggtatagtgcgttccatgtatacttatgcatcctcagatcagagagtttttctattggtgtattgcacgttagctcagcgtacacaattgtgcaaacaaaacataatcacctttctaattattttcgtctgcatcactgcaaagacgtttgagattttcagtacggaatccgttcttgaaaggaaatggtatcttgttcttgacttgtaaatgttaagaactttcggcgtttgacttgagcaagtggtggtatcttacttgtttactccgaggagcttagagcgcgcgcgtctcacttctaggacaggaaacatcgtcgtgcgaagcgctcaaccgcctgcaactaaaatcatatgaactgtaagcaaaagagttcaacaatatacagccttgcaagagaaaagcatgaaaatccttaaaaatcaacaccaataatcggaagatatctgccgtccacacccaaagtgtctgccgtctccatttaacaattcatgatatgcatatcacatttgtcattttcttatgttttttgttttaaattaataccatgcatattgcatagtctcctcctaactactccagtaaaatttaattagtggagatattaggattgcacttggtcatcatttgtcaagtatggccacaaacatttccaatttccatcagatttatggatgtggcatggcatacatatctcgaaaaatactacataatactatatactatgttttagaaaatggaaatgttttgcacgtcacttgaaaaagtccaatttacaggtcacatcaagcttccatgagaccatgaccttctcaccactaattgcaagcatctcttacctttgactattgacttgcacacttgccagcccatatgcccctacaagtatatataatgagcccaccgtgtcattacttgctcagcttcagctctgtgactgcgacgcgaacccatggccgccatggacgagcctcctcagctattcctctgcccgatctccatggagctcatggaggatccggtgacggtgtccaccggcgtgacgtacgaccgccggagcatcgaggagtggctcttcgtctacggccggaccacctgcccggccaccatgcagcctctctccaacttcgacctcactcccaaccacactctcaagcgcgtcatctcgtcgtggctcgatcgcggctcgtcgtcgtcgtcgtcttcgtcgccgtcgacgtcgacgctgtcgagcccgatccacgagctggcgacgccgctgtcgcgcgcgctggagcaggagcggttgctggctgcgctggccgagctggaggagacgccgttcaaggtgaccaagctgaagagcatgagggcccgcatggcgggcgacgtggcaatgcagggggagttcgtcgcctcgggcggggtgcgcgtggtggggcgcgtgatggcgcaggcgctggcggagagcggcggcgacttctcggcgttcgccgcgtgcgaggaggctgccgcggtgctcgccgcgctcccgctctcggacgaggcgtcggtgcgggtcgtccttgcgccggagtgcatcaggcccgtcatggcgctgctccagcgcggcggcgccgaggcgaggctgcacgccatggacatcctcaccaagatctccagctccggatcaggcggcgactggaccgccggcgtcgacatcgacgacgtgatcaagtccctcctcgagctcctctccgacgaggcctccacgaggctcagctcgcgcgcgctcgacgtgctcctcgacgtcgtggagcgggcgcggggcgcccgcgccaaggccgtcgaggtcggcgccgtgcacgtcctcgtcgagctcctcgccgacgccgacgaccgccgcgtcaccgagcgggtactgctgctgctgaagcggctgtgcaagtgccccgaggggcggctcgccttcgcggagcacgacctgtcggtggcggccgtggcgaggacgatgctgcgcgtgtcggagctgtccacgcagctcgccgtcaaggtgctgtggctcgtgtccgtggtggcgccgtcggagaaggtcctcgaggacatgatgctgaccggcgccgtcgcgaagctcctggggctgctccacgtcgagagctcgccgtcgacgaagcagaagacggtgaggatggttaggatccacggggtagtctggaggcagtacgcgtgcttccctaccgacttcagggactacctcaggctgctcgattgattctttctcccctctctttctgattaccgtggctaagctgtaacaacaaagcagatggaaattgtgtttttttttctggtccctcgaaaaaaagaatgtgtattttttacagaaaaaaatcggaaatgtgttttctcatcacgtacaaaaaaaaagggaacgtaatgcatttcaagtattcaaggatatcatcgagattttcaggcgacatttcccctggttttttcgaacaaaccaatcaagtttgattcggatattatcccccctgatccaaattctagctgttggcaccaccaatctataaattgcggcatcggtattgatgaatagagcttttttacaggccacatcttctagcgataatacgtgacacttcgttcgtttcacaatataagaatttcttacctgtatttatatagatattaataaatctagacacatatataaaacatatacattcatcaatgaataaatgtaagtaacaccaaaaggtcttacaatataaaacggaaagagtacttcttaactccaacacttcgatggtaagttagtgttgcataacaaaatgttcctatgcgtgagcccgttgtctacattcagtctggcttttgtcacatgtctcatacaaccttcatcctaaaatataattatttctaactatgtactctacctagaagtatgtaaaagtatatagctaaaagttgctatattttgagataatggtagtataatattgatgacaaacttagaagttacggttgagtttgctaggagcttgtttagggagcaggaggagtaaattctagagggatcttagatggtcttattgttgaggctgcatttgaaaagaggcattaattagataataattcacgaccttttagatcaggcacataatgcggtaatgcccatgaaaatagagtagagtaggctagacatcctcgtaaattatggtatagtctagtccatgtaagttaattttatgggcttccaccacgaacaataggttgttgggaaccctcagtgagggaaaggagaggctgagagggtgtattgacaatatcaaacaagttataagtgtttaaaaccttatattataactatcgaatctttttaaaaccttatattataactatcgaatcttactttggtctaacaaatataatcatatcgggccatggaaatcaagaaaagtggcaattgatcacttacatgttcgaatggatgaatttatgtgcaaaagaatgtccatatatttccttttaaatcaaaacattctcttaagggtaaatagacgataccacaacaaaagtataccaagcatcttaccctatgtcaagactttatttaattggcaacaacacatgctactcatggtgtaaatctcaacaaaaggaatatcatgttatgagctaaataacttgaatacgaccctacgttaatcattaaaaaaagagtgaatttcgtataaccacatgttctatggtcaaaattgcagaaaactgcatgcattatgacttttgacttgtgacacatagtcacatatttttatggtctaaatgtttcataaaaccccaccttgattcaaatttcaatttgatttatcatatatgaaacaatatttttcaaagtagtaaaaaattaagctaacaaccttaatcaaataggagtagacctacttaaaagcaaatgttttgggacgatggtttttccatgtcttaataggtattgaagtctttcttacttccagtaaaactatgcaactctgtttgccttctgatttttattactagtagcttaattaagaatgaacataattttacataaatttcaataaataacttgaaaaatttagaaaaatacttccttccaataaagtctaattacgtatgcatgactaattgacatatccattatattggtctatctttcatcccaaaagagagaaaaaattgtcttgtttgttaaccaactccacaagactacattggttctgttcttgagaattattttcaggtctacaattattgcattctggatttgggactagtaaaatttcttcaggattattgctgctactactgtttcagatgcgatgaaatttgaaacttctcgtgggggccatcagtccaacaccaaccgagcttacctacaataggcgaccacggaaatatgctctcttgcgaggtccatctcgaaaaagtacacgaaaaagctccccggaagggaagacgacctggggctggttgctcgtgctgcccccgagatctaaccaaaacccgcgtcccatctcacctcgcctcacctcaccatccgacgagcccccggatcaccggctccgacctgtcgccggcggagagcgccgcgggatccaggcgttgaggttggggagcggggtgtgtgtgccaggcgctcgggcgggggcgagcgggcggcgacgatgccggtggcggcgtcggccatctacttcctcaacctccgaggggacgtcctcatcaaccgcctctaccgcgacgatgtcgggtgcgtagtaccgttcgcaatcatccccccctcgcctcgcctcgtcgtctcgccgcgcctcctgcgcccgcgccgctcgtggtttggagtggtagatctgaggccgttgggatcgattagctccgtttcctagctcgccgttgcgcggatcgcgcgaggtctagtggatagctcgtgaaattccgctcggaaaggcttcgattagcgaacgggatgcggggattgactcgttgcgtgctgaaatttggcccctaccctcaggttgtcgcaataccatgtggttgaatttcggaatggtatctcgttctttagcttgtgattgtggaagctacatgttttgcagcatgaaggaagatgccactgactgaaatactgaataggagaattagttcgatttcaccttggatggctgtgctgtggtggtcgattatctgaaacaattgactttatactatttcccctccacattctgaattcgatgttgtgttgactgaagcatttcatataagctgactgctgcatagctcatatgatctttcctagtggtttactatcgagaaagatatagcaagtggccttgttgtctttaatacgatagccattattttctaagggtgctaaaaatgtaaactaccactaaacattttcggtttgcttgtcttacttaaaaccctcttttttttggtatttggttgcgtgcaagtttactgaccacctgttttgctcattatgtatgactatacaggggaaatatggttgatgcattcaggatgcacattatgcaaacaaaagaactgggtacatgccctgttcggcaaataggaggctgttcattcctttacatgaggattagtaatgtctatattgtgatcgtggttagcagcaatgctaatgttgcttgtgctttcaagtttgtcgtggaggtatgcaatttatatcatctttgaataatttggaataaaataaatataacatgcatacatattacatctctatgatctagatgaatatgaagctcaagaagtcaattgttgttttttccgctagaaatggtatgtctatgttagtgtgttgtagcatagatggctagtctaattcctcaataagtccagagcaaaagaatctattagttactaaagaggcatatgatttttctgaagttacctgtttaataataataataattttaaattgcaatatgccgtcgaaaagtttagacagttttaccatctaatgatggtatgttttgggggcaactagaattttctatcgcttaagcgtaattgcgtaaatggtgatgattttttgaggaaccaaaagttttttttttccttgaatggctacatggtcgatgttccttgttaatcattgctggaaaatactccttaagccctgtttcgatgctttctataatttcttaagccctgtttgatgaggctgactgggcgtagaattagtttaactagttggtagatgtgagtcaataatgaagcttcagttataaattctagacatatatccttctgatacctgcatatcatcctctagtgttttgaacggttttttatgtatgattttttttgtaaattaccaggcagtggctcttttcaagtcatactttggtggtgcttttgatgaagatgctatcagaaataactttgttttaatctatgagcttcttgatggtaagggacatcttatttttggactttgtttcatcaatttgcactgtggatgcttctatttacctgtagaactgtctctctcatctaactgtgcagaaattatggacttcggttaccctcaaaacctctcacctgaaatcttaaaattgtatataactcaagaaggagttcggtcgccattttcctccaaggtgagaaaaatgtgacattgaaataagataaccggataaaaagtcacatcaaatagtttgttgctcatttattttgtgtgaaagcatctgaatcattttttttttgttctctgcactgatagccttcagataagcctgttccgaatgccactctacaagttactggtgctgttggttggagaagagagggtcttatgtacaagaagaacgaggtgcctgttccaaatgccacctccaagtttcatctgtatttggacatattatgcattgctagctagctagcatttctaataatcccagctcagcatagatgctagtaatgtcagaacgctgcatgtatttcgacatgcagaatagttttcatacatattgtcaatgtgcactagattgcctgttacagaagtagtccatactttatttgttgatttctttgttgccattttggttctgcatactttatttctttttagcactttgcatgactctttttagcattgagatacactaatatagtattcttttctcttgaaaggttttcttggacattgttgaaagtgtaaatcttcttatgtcttctaaaggtatttcatggattactatgattttattgtactgctctgatgtttttgttgtccttaatgttgctttgactgatgtttaatgtggaaattgccttctctgcagggagtgttctacgatgtgatgtgactgggaagattcttatgaagtgcttcctttctggaatgcctgatctgaaattgggattaaatgacaagatcgggcttgaaaaagaagctcaactcaagtccaggcctgcaaagaggtatcactttatcaataattagtacatgaagaaaaaaaattgagcatctggtttttctgattagtatagtttatatggtatgtacacaatctttactactttaactgaattgtctgctggtcggttctcctttttcctcaacagcggaaagaccattgagcttgatgatgtcacattccaccagtgtgtcaacttgacaagatttaactcagaaaagacagtcagctttgtgccgccagacggtgaatttgaattgatgaagtaatattatgatccctccttatgcttgtattagttttcccctgtagtgacatttttattctttacttggcttttgaccacaaaattctgttgtagatatcgaatcactgagggtgtaaatctcccattccgggttctaccaacgattaaggaattgggccgaacacgcatggagataaatgttaaagtaagtgtgcatatctgaaattgtgaatgcatgaggccattatcacgttttctgacacgatgaaccttttacacaggttaagagtgtttttggtgctaagatgtttgcacttggtgttgtcgtcaaagtccctgttccaaaacaaacagcaaagactagtttccaaaccacatctgggaaagccaaatataatgcttcaattgattccctagtgtggaagtaagtgcaaattatttctatatagcagtttatctatgagaaagatgttctttggcttttctttttatgggttaggtcttgttctggcagagcataaacataaacctaccaatttttgttggttacggtgtacaaagctgtatccgatgctatattggctcaattttcttactcttgaagagctactccttgccaattttgccacaaatttattagcatgccttttgcactcataagtcttgacacacttctgcaattataggatcaggaagtttcctggacaaactgaggcaaccatgagtgccgaagttgagctgatttctacaatgggggaaaagaaatcatggaacaggccgccaattcagatggaattccaggttaattttacctccttttgaacaaccctcttatcattagcaaaatctgtcagccagttcattttatttttgagcttacagaaaatgcaatgttagagatatcataacagttatgaattaaacttgagcatgcacaagaaaaaaaaatggtattccatcattcgttggcctttgagtatgtttattatccgaggtgttatcttgaagtgttcttacaaaaaaaaacatcttctgcttcattgttatgctgataaaatgtgccttcgagtttggttatcttgtttaaccatgctttctgatttgttgtttctgtaggttcctatgtttactgcttctgggttacgagttcggttccttaaggtacgtgcagggaatgctaatatagaacctttttaacacataccagacagttcagaactcatgttgagatgcatattccaggtgtgggagaagagcggttacaacaccgttgagtgggttcgctacatcacaagggctggatcatatgagataaggtgttagcgatgaagaaaaaagtcccaggtatttggcacggttatttcaaggattcgcggagctttctttctagtacggcgtcatgaatgatcataaagcatgtatattacatatgacaccactttttctttaagctattactttggcaaagggtagagcagagcagacaaattttcctgggttcttgtaatcgttttgacacgggatatctagtatcccctgagtcttgtttgtgtggtagggcatattttcatttgtatatgagaagatggcggtagcgtttgttcttgttgatcaatatacatatactcattggcagtttgtattgctttcttattaaattgatgggtgaattcacttgcagaagcaatgtgtataaacatgtgactcgacggtgctcgagacatcgactcctgaagtatacagtgtcttaacattttttgaggttttttttgcccttttgcgaatgactatttgtgattgccaccggagtccatgcgttttatagggcttacattggtatcgaatcaattttcgtaggaatctgaaatatttcctgcgtttcatcatagtagttgatgggttgagatagagatagagaaaaactgaggagtcagctgatttttatgatagctatttattaagatacaaacgaataaattaattcctacagagttgaaatcaaaaggtattctaaaaaaatattactacacctagtacaaaggtgaaaacttattttagaaaaatattttaagaatagggtagtagcgcatgagcatccgattcgatatggcacgcatctccgtggcgtcgttgacactaacaatgtcgcgtgattcgtacgggagtcgggacagcctcctcttgatctcgtaaaaatattagaacttcataaaataacagaaaacctatacaacgatatcccattagattaggatacccttttatgagatagtatctgattcttttgtgatactagctgtatggtacccgatacctgtaataccatgttacatggtacctataataccgaggacatgaaacctgtgatactcgcaagagaatagttaatatgtctatcccgttgtagtgggatcccgttttatagcagccctcgataataaagttagatagattttttgaactttctttttttctctaatttgcaaatctatttttcgatctcgttttcatgtccaactttaattgtccattttatttaattttttttaaaatctaaaaatataagtcatgcataaaatactattaatactttataatatactaatagcaacaaaaatattaatcataaaatttttttaaataagatgaataattaaagtactattcatgttttattctaatatactaatagcaataaaattattaatcataaaagaattttaaataaaacgaacaattaaaattaaacacgaaaacttatagctacgcttattttggatagagggacttgattggctgagtttgagagtaaaggaaataagaagattaagaagagacgcaaaataaggtgagctattagcgcatgatgaatataactattttaaaattttaaaataaattaatatgattttttaaagtaacttttcaatagagttttttttaaagaaaaacacatcggctagtactcctccgtcctataatataaaggattattgtttgaccactcatcttatcttaaaaaaatttgtacaaatataaaaaacaaagttatgtataaagtaatttgaataataaaataagttaaaaaataaataataattttaaattttttttaataagacgagtggttaatctttatattttatattagggtcaattgcatatttgccatcggtttgaaccggtacggtgaatttgccattataaaaaattttattgcatatttgccaccaaacacagatagaacccaacaaccttgccattagactcacagatcagactaacactgttagaaggttggttttgatgaaaattaggacaatgttaccttgccaaggaaattgaagcaacagagtctttcctctcctttttcttctgccgccatggtgctgctacaacatgttgctgttactgcagtccgaagcagcaagccgctgcagctgcccaagatgcagccgtgctcgccgatgttgtttgccgcagcttcacaagcctctgccgtgctcgccgctgctgcttccgtagcgtcacaaactgccgccgcgccgtcacgccgtggccgcccgccttgctgccccgcaaaatccatccccgccttgctgccttaccatatcctactttattgcaaccaatttttgtttgatttgctcttgatttggaagaagagatgagaggatttggggatgtagtagggttcgaggatagggaagggaatcggccaatcgggacctgcctttctgggagatgggggcttctgcgtgcgagaggggtagggaggggggcaaaacggtcttgttgtgcagctttgtttttcacattagttttatgaattatttttgtcttcttatttgcactagctcaaacggtaatggtaaacggaaggtacacatatcagttttaatggcaaatttgcagtttgcgtttttttaatggctatttcgaattagagggtaagagtagtggtatatttgcaattctccctttatattatgagatggacggagaagtagtttgggaaggtgttttctctcactcaatctcccagcaacgaatagcaacctaggttcccatcgcaactgaccgatccccagccgccgccgccgccgccgccgccgctcaaggaagcgcatcagatggcatcgccgtcgctcagggacgccgtgggcggcctcgaccgcgaccccttcgtctccctcctcgggaagctcatcggcgagtcccgccgcctgcagaacgacccgccggccctcgtcccgcaggaggacctcgtggcgcagcacgtggtcgacgcgctcctcccggtgtccatggagaccgggggcggcccgctcgtcgtgcggaaggtgagctacgccgagggccggagcaacgtcatcgtcgagtaccccggcaccgtccccggccgcgccatctccttcgtcggcatgcacatggacgtcgtccccgccaaccccgacgaatgggtaggttgctatggagattgttctcctgacgctgtcaaaaattgcttctcaagtttatgcttctttatgaattaatgatttgagtggttgcttgatttggtgtgtttctgccggatattttgattttgtgatcttatctaatttcgttgatggttgcctaaattgcatcattctcatatttacgggtggattatcctggtgagtagtgaccttgtttatgtgagctggtgatttctccatagtaataaccgctttgttgtgtggttgttgtaagaaaataataagttgcatgctagcgttgcataagcatattgatagatatgatgggatatagtaatgtgaaaaatggcatattgtttacttccactgtgttgtatactgcaaaaatctttgctcaatttcatgatgtttatttttgctcgtgctagctttgttgcgtcaaattactaaaaggtttacctcaagtaaatttctccttggttctaattggtggcccaaacgtctctacttgtccaggatttcgatcccttctcactaacgtttgacagtgaagacaaggacaaacttaggggccgtgggacaaccgactgccttggccatgtggcgctggttgctcagctcatgaggagacttggtgaggtcaagccggtgctgaaacattcggtcattgcggtgttcattgccaatgaggaaaactcacttatcactggcattggtgtcgatggccttgtgaaggatgggttgctggataagctcaagaatggacccttgtgagtattgtgctgtttgatgcatggagggaatgtccgactaaactaatgtgttgttcgtgaggaatatgtgctgatttggttgtcattgttgtgtggcattgtgaaggttttggatagatacggccgataagcagccttgcatcggcaccggtggagtgattacatggcatctgaaggcaattgggaagctattccacagtggcctcgcacataaggtacctgatttgaacttgtcagaactcagaatagtgtacttgttgtgttatatagctccagtaggttccagcaatacactgcttcgtggaaagaatgcataaagcatatggttcattttctatgacctgtgttcttttaaattgtatagctgcataaattaagcttgcatccttgtagttagtgcaaaagcaacaatttatattgatcaatgccaaattgaaatgacacaaaaaggataaggaaagtgactgcttaaacatgagttatgttgcaacttacagcgtgatcactctgcttttgaaatgttatctgttgcaacattaccccttggattttttttggggggtaaaaagtgcagaacgtgtcttcatcatgctagggaagattcattcgaatattcaattggcttagagggacaaaacaatttcaaacatacaagttgggagacaacaaatattgtatttgtatatgaattacttttcttttgtgtgtgtcaggccataaatgccatggagttaaatatggaagcactgaaagaaatacagactatgttttacaacgatttccctccacatgagaaagagaagctctataagtttgctaccccatctacgatcaaaccaacaaaatggagctgtatgttcaagttttacttgtgttttctaatgttacaactttttagttgtgtttcctaatgttaaagaaaaccactgtgtacaatccatgcaattaacaaatggtgatttgcagatcctggtgggggtctgaatcaaattcctggagaatgtacaatttcaggggatataaggtccaactattgctatatggttcttgaatgcactttaattgtactcaaaagaaaaatggtccaagcttttgttttattatgttcatacattgttataggcatggggacatgcggttggtgaggctttgttcctcccaggggccctaccataaatttgcttggtcatttaggcggtgttcttttctactaaagatgaagttagggcacataaaataagaaagccaatagtgcatgattaattgagttttaattattaaaaacttgaaaaatggatttacatgatattttaaaacaatttcatatagaaagcttaagcacaaaatgcaccgtttagctttttaaaaagcgtgctaacagaaccgaggtaaaatctatgtcttaatcagaaaagaacggggccttagtgttacaatgcagcagagtatcactgcacaaatttttatatgtttgcaggactaggggaaacaaaataatgggatcaccagtatttcacaagtcacaacattcaataaagactgatgcttctgttgtttcttccatatcattgaaaaatagttttttaaattatactgaccatatttttgtacatattacaggttgactcctttctacaggtaaagcccatttttcatgcatggactgttctctctcataattttgtctccacttctgccgaatgttgttttaatttgacagttgcatgttgccattcatacagcacgacatctgtagtgaagaaattacaagagtatgtacatgatataaatgagaacattgaaaagcttcctactcgtggtccggtatctaaatatgttcttcctgatgaaaacctccgaggaaggtgaagcatatatgactttattctcttatggcagtaacagtaaccatcataatttacagattgattatcaattcgccattacttaccattgatcttgctaggcttgagatcactattgatgaagatattatgaatggggtggcctgtaatctcgagtcgcgaggctttcaagcattatgcaaagcaactgaggaaattgtcggccacgtggaaccatattccattactgggagtctgcccctgattagggaattacaggtttgagaggaaactggtgcaagtgttatcttgggaacaatcgccatttaactaaaacaaattcctcttcaaactttgcaggatgaagggtttgatgttcagactgctgggtatggtaagtaccttaccaaaaaactgtttcctgatttctttaggtcatgtcatcaatgaacaattaatggaaaagtctgttaacagtattcacatggttgagagtagtatagattaaattatgtataccgttcattttttgttgagttccacttggcatcctattatattgatatactatcgcggtaaacaagtggaaatgtagacagtgtgctgtaaatgtttatctgatgcttcttctgttcctgtaggcttactcaagacataccacgcaaagaacgagtactgtctattttcagatatggcccaaggctttcaagtatttctgagcatcatttcacagttggaagcagatgtttgagtcttgttttagggaggaaaaaaatgagcgttcactggtacttattcctgttacttgttgctctaataaaggcactcacagtgcaagctacccaaaatgaggaacctcaggctaaggccacacctcctctcccacggtgcaaagatgctttagggtgttcttagtttttcatgtaaacccttgtcatcttctattctagtcctcacatgttttcaaacaacataacatacaaaatttaccactaaacaccctaaaatgtacaaactagtataaaatttctcccccgccctcaatctctccgttccccaatccaccacaacagcgccaacggaagccggcggctccccgacctcttcccagccagtggcttggagggcgacggcggcgtcacgagaactcgctggggccccttctctccctgctggcaacgagggtgacgggggcgccgtgagagctcatcggtccctccacttccggtcggcgatgagggcgcagaggggggcggcggcgcgagagatcactagcccctctactttcggccgacaggccgatgacgagggcgcggagggcggctgcggcgcgagagctcaccggcccctccacttctggccgtcgacgagggcgcggagggcgacggcagcgcgagagctcacagggcccctctactcctagccagggtttgcaaaaccgtcagtaaccgcgcggttaatggtaaaagaaaaaccacgataacctccttaaattcaaataaatttaaaaattaatttgaaattttgataaattttacacggtttcgtatggtttgccatggttaccgcgcggtaactgtgtttaccatcggggcgtggtaacctcggcggagggggggggggggcgacgatagatccacaatgccgtggaggctggggacaagacgacagtgtcctcggtctcgtctccacggcgcgggagcggagcacggggacgaactcagcgaagcagagcggagcaagggggcggcgacggggtcggtgacgcagagcgggagacggtgacgaggtcggcggcataggagcgggagatggcgacgaggtcggcggcgcggatcgagaggcgattctcccttgaggtggagccgacgagctcaccggttgccgctgaatcaagtttccctggcgacgaatcgagtaagctcgccagagtgggtctacctcctcgccctagtcctctcctcgttcattcctctccgcccattcctccctagccatcgccatcgccgcgacccaacctgtccccgccgctttttcccgtcctttggcttctcctcttcctcgtcagcacttggcacccggcgagctccaagcctgctcagatcttggcatggcagcgtgggttggcggggacgaatggggaacatttgggagtagcaacagagaggggaccgctcgcactttctttttcaggcatgaggaacccggaccctagctaggaggcgcaaaccttgcaagggcacgagacccacctccttttctcctccacgtcaacaaggtaacgctccacgtaggagcattgtgaaaggcttaatagttctctgctcttggactcagtccattgtactaggaaatcgagctcatgttagagcataagcaatgggtggcttagggtcgtgcccttgctcatggccgtccgacccagttacctttcgcgcctgagccgtctcctctgctaggcacgcgactactagcggggggacacgcccctcggtcacttttcgttgagacggcgtgggggcacgtgttgggtgcgcggtggcctggcgtgtgtccagtggacaccgctcccacccctatattttaccgttccacccctcgccctcgtcgttggaagtaggcaagaggcacacggcagtgaggaggagctagaggaggcgaggtggtggaggagccggcgaatctgcgatgaccccgcggtggcgacggccccacgacggcgacgggctcaccagatccagggccggcgacgaccccgcgatgccaacgggcggagggagagcggtggcggcgcggcactcaagatccaacctccgcgtgccgctcgccgtggtggaggagctgttggccaccctgcgcaccatcggcggccccacgaagatccgcgacagcgacgacctcacggcagccgacgacgggagagagaggccgatgggagagagaggccaccccgcgctcccctcgcggtcgtccaccccgcgcgctgctcgcctttcgccaccgtgcaccgttcgccatctatggaggagacgagaagaggagaggaagagacaaggacggcagcgtcggtgggctgatgagccctttagctgggctatagaagggtactttcataatttttcactttgtgggctggagtatctttatcaagtggtctcagattttgaagaacccattggaggtatccttcagtgagagatgagttccctagaaaggatcctcagttagtgaagacactctaagggtggctttggatgtagatgcccttgtaccacgtagaagctcttgtcaatatcgaacaattccattgtgtgtgacaatcaaggatggtgcttttccgctgggccattttcgtgggttgttctgacaatggcccgaacttatgaagtctgacaggcagcatttgttcagtttctcgtttcatgggctgcatacctgatggtcatcctcaatagccaggttgcaatggaaatccatcatcttggtgcacgaaatgggaatatgggatatcactacatcctgggcctagggttaccacatttagggtccatttgattgttagcaaaaacataggaaattagaagattttgatttgtatgaaaaacatagaattttagaagattttaatcgtataagaaaaaaatccaatgaagtcttttgaagcaaaggattaaatcatatcttttccttggagattcgtacggaatgaacaatcctatacgtattttgaagaaaagttagcaagaattctaatatctttttcatccgattcctgcgtttatctcacgtcctaaccaaacaaccatcttgtgtgtttgcaattatctattttgcatttgttttccttgtcaaaaaccttttttttctattttttttgttttttttaatttttgttttctattcgtttcaaatgaacctttacactttataagctcagtaagtcattgacttgtccctagactgtcatatgttcctaagtaacctggatcacaggacgagctaatgttcctgtcccgggaacgaagcatctgtttgttcctaagtaacctggatcaccagatgagctaacgttcatgtcctgtgaattttgttccctgatcgagggtcgtgattgatgtatgggatgagcagggtgttgcacctagcacaaggccaatcgtcatagtaaaaaaactagaatcggtgggtgacccgaccgacctctcagttcactagtcttggcttgggcggtcgtagttcacgtatacatttatgttattattcctttctattcacaaggtgaggaatagtatgatggttagggaatgacgtgttggaaatatagtcatatatcggcatattttaatccaaaatattaagacaataataatgcatgaacaatgtgggatgatctagtgataaaatctaacataacaggagcatgcttaagatagaataagcatcatcatcatacaaagaacgcaatagaattgcgactaacaaagatatcaaaaattgaaataacagtaaacgcagaaggttatacctgtgaatgtccctccgctggattgtgaggctgaaggtgtggaagaaccccacggcctcggcccggcgcgccgcgcgtgtggctttccgatccccacctcaaccggtcaatagggagcctccaataactccctatttaagttgagatactcctcttttaattcccaaggtggtattattatccttaacatttattatgggcctttgagatttaatagaataaatcgggcctagcccatttattctaacatgacattgtcaactcgctagccaatcagtagcgattttgctatatatttgtcgacaaattttctcccaaaaatttgacagatgtaattacagtacaatcgtagtgtaattacgctgtaacttgcatgtaattacactgtaactatagtgtaacttgtatgtaactttcaaaaatctctctgtaatatgttatttcggtaaaatggaggttgtgggaacaaatccttatacatatgtgtgtgccgtgattttttttcttcctcagcaaaacaaatcttgtaatagatataatgatttaaaattacatgaaacttacgtacaagttacactgtagttacatgcaagttacagtgtaattacatataagttacagtgtaattacactacgattgtattacaattacatctgtcaaatttttaggagaaaatttatcgccaaatgtataggtggtcccatcagtagtggtttaatgtctggttcacctgaaaaccaactggttctctaaatgcatgtctagcgagttgatttttaggtgaaccagatattaaaccgttactgtttggcagcgagttgacaacgtcattccctaaccatcatgttattgctcaccttgcgagttgactagagcatttgtgcaattattgttcattcatccataatacaaccaagcaggagtggggtttattatcttccgatgacccaacctaaaatatttttgtatttgatttagtgatcatagccccaaaaccccttttgccaaacaccaggtccctcacaaatctatctgtcgactacagaacatcgacaacgaccatcacattgcctcagccagcagacatgttactagcaggataaaggaagaggtggtgaagagaagaggaagggatggagatggaggttctatgttgcctggtcgtgcaagaggcactgactgatagcaaccgagcaggagaacaaaagattgggagctgcttggggaaataagtgaagggggattatgttaacgggccagacaagtccatctgccctagctaacaacacaacgagagaaagggaggagcttggcactagatttgctcgcaccacctcttcttgtgcgagcgtcactcgagttctctggtctcgacgctatgttataccttgccttcttctccaatgtcctctcgttccgatccatcgtccccaagaatgtatatggtcatcgagccacgtccctaactagcatatcctaaataagtagtatacccctgttgtcccatgctttcgaagatgtcgtcccatatttctcgttcctgttcctcaaagcatcaaaccccgcgggagcattagcgactagggttcattccagcaaggataccaaagcaagcgcgcagacgcagaccagaccatttgcgcgcctcgcggtgcagcagcatgcagtgctacctcatctactccctccggctaaaaaaagacaaactctggatttccgtgtctcgtttgactgtccgtcttatatgaaatttttttataattagtattttcattgttgtcagatgataaaacatgattaatactctatgcgtgacttgtctttttaatctttttcatattttttttaaataagataaatggttaaacgttggacataaaaaaccgagggtttactttttttttttgggtacgaagagagtagctgttacgaccacctagcaggctagcagtaacatgtgttgatggtgcgtgcggaatgaacagccgcatgtggcgaaccacgataggacatgacatttcgtttcacgtaccgtacgccgtcggtacgtgcaggtctatcgaccgcgaccgaaaacagccaccagatcgatcgtggtcgtggatcagctcaaccacgtaccagattctctgcccgaccgatcgatcgattggcactacgtgctgttagtactagcctagctagctcgatagctgcaggggcagcgtcacatatgcacgagatgagagacgcgcaagcgtacactccgtgcactgcccagtttccttcttttgatgcaccagggggtccagggccggatcgagctgcacacgcaccaattaacacgtacaggatgccacagcttttgtaccaaattacaatgtagtagcaaggctcaccagccgcggaatgggttaagctcccgtgcggtccccgacctgggcgcgtcgtcggctagagtagcgctgggtacgcgattgcatgggagtactcaactggtcgggtaattggggcatggatgcatgagctgtttcggttggttctgcggttggctgtgacctgtcacgttttgttgctttgcttggacacatccacagcccctgccacgcattaccccacgactatgcgactgatagaccactatagtgtttttactgtttttacagggcatgcagagacctcgtacgtccttggggttacttacgcatattacttttcgtgatactagtattcaaaaattgagaatggatacatctcaagaaaatgagaatgcatcaagcaatggcggagaccccaaatgaaaggggccaactacagagatgaaatcgatcgcttctagagaaaaaaaaaggaaaatgaatcaattacatcagataatcgttcttaagcatgaatgataatgtgtgcctgagagcacaaaacctctgtttccatgtttgattaatacatgatatataatatatgaccgtcatggacatgtgatttttttaatggaacatttaactatttaccatttttaagacgtggcgtgaataatttatcatttatagtttatgacaagtgggtccaggtaaactgttaaacatcacatctaacattggtaaatagttaaatatctttttaatgggtacgcaatgtttaaaattattttgagcaatgagaaaatattccatgatataacaacggaagaatatataaaagaaaatattttcatatcgctaaaagtatatcaaagcctcttatttatattcgtagtactaggatgagactcatcttataataagttgttaaattttatgccggagggagtgaatagtgataaatgtttcaaaaaaaatagtaatatagtcatataggacgcatcattaattgatgctatgcatgtcctaaaatgtcatctgtctaagatccaggcagtactccctccgtcccattttaaacgtagccatgacttttcgtgtccaaatttgatcatccatcattcgaactttttatgattagtaattttagtgttattagatgataaagtacttttatgcataacttatgttttttaatttttttttaaaaaaaattcaaacaagacgaacgatcaaaattagtttgcttggggtcagaccgccaagaatacatttccttatagttagctgccaagaaatctgaatatccctgactctttagacttagcggtatttacatggcggtcggccaacggaataattaaccttaatggttttcaggctatttttgaccgccaaggacattatattttcttgtagtgcacacgaaaacttatgtctgcgtttaaaatacgacggatggagtacttaactagctagcccctcctgcaaagtgcgaacttaatttatcttaacctgtgtatcaaggaggttccacagaatgacatgtaatcgatgcatgcatggaattaatggatattggacccctctatgtcttaaatatatatgaaaatgacgtggagcattgtagtccctaataatatgccctaaatagtactgtgactatgtaatgccgctaacgtactcagggacactgatactcttacactaatttgtctcaagtactgaaacccaacaccaacagtgcatgctaagcgcctaattaagcatctagccccatgcttggcgactggcagagcgttgaggagtgacttcaccagcttttgctgaccatccagagctagccatgacgatcacgaattcgctgatatatcgatctgccagccagtgtggatagatagatctgcatatatactagtcacgcatgctccttggcagggcgccccccagcgtagggcagtgtacagtggctagcgtctgcctacgtacggctgctgctgcgtgcaatcgagcaatgcatcattgcgtcgatctgcacgatgcatgcatgtctccgctcttgtgccagccagcgaatgtaatggacacgtactatacacacaccattgattgatctcgagcttgtatagtacgtcgtgatcggccgatcgaacgaacgcgtgcgaatcgcatgcgcgcgtgatggccaatggatcatcgatcgtatgcatgcatgcaatgcattcgcgtgactgttccatccaacgggctaatcctttctttcttctgttcctactgatgatatgccacttgccacgccaatcaacgcatttcactgtcccagaacaagggttatagtactgttagcgtacgcgttagggccccaagtgcggtgcatacattattaatgaagaccatctgacatgaaggtactcacgctattagatctacagacccacctctgctcggtcatactgacttgtactgagctctccatgcttcaaacagttctgtgtatggtatatagtatgtaagatctgtctaggaggttacaacgacttacaagttgaaaccccccatactcgtatgcgtgctttaatccaatgcgatgctggtgctttcgtacgcaggagagcaaggaccaccacgtgaccggaaccctctgtttcggagcacggacacgagcgattgtaccgagatgtggcgtacgtatacgttcctatcaacatcaccgaaacggacgtagacgaccaaaaaccagaaggcggaagggtgggtgtggatgggccgtcggctagctcgtcgcatgcgcaccgcgtacgcctacgttatcgagtcagcttccacgcacgtacggttccaccacgaacgaggacagcgcggttggtatacgtcggtctaaccatccaccggtccactactagctcgccatgcatgcagctcatctgtctcggcctagaaaccgggccggggcgcgcgccggtgaacctactacttgctggctgccgcagcgcccccgcccgcgcgcgcgcatatgcgtccgttcgcgtggcaccaaagcgcattgattccatcccttgtctcgcacaggccggagggggggccatccgcgccatgcgatgcatgcatgggcgcgcgcgtctgcctccccgcccgcccgctgcgacgtccctccaaaaaaaacggccggccgggcggcacggtgcgcaactgcacatgcccacgctgcatgcgcctgcgccgagagcgcgcagcccggccggcggcgcgtgtcagcgagggagggaggggtgatggtgggtgagcccggcctgcctgcctgcctgcatgcctcgcgcgcgcaagcgcaaaccgcacacacggcaggcaggcaacagagcgccttgttgttggccgccgggaacgagaagcccgtgaacgaccgagcgaggccgcgccctcctgcgcgcgcacagtgacgcccgccgtgccggccgggaggatctgtcgttgcgctgcccgcgcgccggcccgcgcgtttcggacgcttgtgcttgtccacacgttcgtcgctcacgaaaaacgtaccgatgcctagtccaagggctgatgttacttactactactactactacaactgatctcgaagtagccggttctggatacatgtagccgtggaccgtttgcaacgtcagatcgagtgcgtacagcgtagcgcgctatatacagtgtgtacagagtaaccgtgtatcgatccaaggacatgggtagcaggaggagcaatacagagaactgactgtaagatagagtttctttctcttcgcttctatacgcagtacaagtattagagcaagtttaatagtacatccaactacaagctccaatttatttatagctaatttaatagtcgatttgtacaatagttgcttactatactattaatacctggtcccacatgttatatacacatcacgtcttgtaatccgtgctgtagctggctacagatttgtagcccgctgatcttctctcctattttatcactttaaaatatgtttatagctggcttatagcctatacctgctcttatactgtactactattgtgttctaagattggaccatgtggtccaatttgtcaggggaatccatgtgacgagcaacgatctcgaaaaccgcgtcacagagcagtgatgggtacaaatctcgggcagcatagacacgaacaaacttgcgagtgtaggtgtgccatgcactcatgcaggcagccgtaaactttttgggacaggtcagtctcaccaaactttctacgagtactttgccagtttgcctggttgaaacgtcgggattttgtcaatttaaatgcatcgattcgtgtgaaatttaggggttgtttgttccctcccaaacattgccaaaccttcttgccaaacctagccaaatatatggcttataaattgatggacacaccttagacatggtttgactagaaaatggttgtatgacacgtgggcctttaaattagaaaactgtggcatgccacaagtttggaagtgaaacaaacatatgtcttaaaaagtgtggcaaagtttgttaaagtgagggagtgaaccaaactccctccgtctcacttacgagcaactatgagtttccgtggctaattttaatcgtttgttttattttaaaaattataattagtattttttattgttatgacatgatagaacatgaatattactttatatttgacttatgtttttaaattttttaaaaaactttttaaataagacggacgatcaaagttgagcacggaaaattatggctgcacttaaaataggatgaagggagtacaactatgtgtttaatatagtactactagtattccctctatcccataaaaattaatctagtactccctctatactcgtaaaggaagtcgtttaggataatgtttaagtcaaatcttatgaatataaattatgaatatctcttaagttgttgagtttaaaaatgtaaaaattatatgaatagatttgtcttgaaaaatactttcataaaagtatacatataccaattttcaataaataattttatagaaacaagaagtcaaaattgtgttttggagaccgtgccgctgtccaaaacgacctcctttacgagtacggagggagtactggatgtgacacattaatttggacatacctctatttagatccgttgtactagaatatgtcacacccaattctaagttcgttttttatgagacgaagggagtacttagagtgggtttagaattgtttttttcttatttttgtaagaaatgtactcgtaattgtgatgttagttttctaaaaaaactaatgggacctggttttcatatgatcctggtaaaactttataaaaagaactgctcatctcgtttggagtacaaaatcctaaaaatgcaagaaaataaaagcacaagattggaatgtcacggcatttcaaatcccatggaaaaaaatttgtaagaattattcaaagcatgtattccgatggctcatagaaaaaagagtaaattacacgcgaagatgtcatattatcatctagactcgtaaacttgaaaaattgcacattgagatccactatcttgttttaatgatccataagtggtccaaagtgtgtttgactatagccgaacgcctatgtggcgctccacatcttaacgtggtggtaattttgtaattaccccctattgctacaatagtcatcgaaatcccccaaaatattctaaatccctttgcattcccccccccccgccgcgtgcttccatgggagaggcctaagtatcacgaggatgatgtcggcagtcatcggcggtacgagatgattgaggtgttaatttgggttgtgcgacaaacgatgctcgataggcgacggacaacgcaccttcctcgtcgacacgacggttgcgatggacctcaactttaagggagaagattaatcggtgtccctaccgtcgttacctcatcgtttcctgccgcctccgaacagcatcctcatcattgcaaccctagtcgtcaggggaatgcaaagagacgaagggattcggggggatttcgatgactacattagcagtagggggtaagtacaaaattatagcctcgtcgagatgcggaggaggctggatgcaaaatgctgcctacgtggagcgccatgtaggcagccaactctggtcaaacgcgctatggaccggctatgatttattaaaacaagattatggatcttaatgtgtaatttttcaagtttatagatctaagtgatatctttgtttaagtttaagaaccggtcatgtattttactctagaaaaaatatagaaattttgtgatataggttagttaccccatctgtctctaaaatacttagttcctagaatccaaatgcacattttgtaacgagagtaaattactctaatgcctctaattaatagaaaattagtttggtgagttggtagataacggggtattgaaggataaattttcttgattcgtgaaccaatattaagtaataaggtactacgtatgagttagatttattttgaacaaagtttaagctctataaatttattttttttagacgaaaggagtagattagagtgagggtaaagagagaaaaggatattgcatcgatatatcaaaggaaatgaaagccatgaggttggagttcacgtttaaaatctaaagatttgaatcacacttggtattccacataaatttgacaaaccctaaatcctatgatccaaatgatttcactaagaaatttcctatgaattcatatccattatttttcctttaaaaatactataacccaaaggtctcggtcctacggaaattagggagacatcgtgtttgggataggctgatttttcctttactactcaaaaatcagaaactacctaaaattgacagaatctgacctcgggtatccttgtactccctgtcaaaaaaatttccaattctactcccttcgtactaaaatataacaacttcgtattcaaaatttgttccagaatatatataacaatttcttcacctacattctcttcttaacctatcacaatcttctatcattcaaattctataccaactttctcttctcaatcaatcacaactttcttccatttaattctaccatcttttttaatacctgtgtctgagcctaaaactctttatattttaagacggaggtagtatatatgaaaataactcctctctcggtaaaaaaagaactataaatatgaatctacatataggacagcgggagtatatgatggacggaaagaacggcggactgaagctacaagtgcagaaccacaaaaaggatggttaagcacttaagcttatctaatccttcttgctttggaagaactgcctgcttgcgttcagtatataaaaaatttaactctcctgtattaaaaaaaaaaagaacaggcagttctcctgacgatcttcactaaaaaaaagcaataaaagctgaaaagctgggcagattcttgcagaagattatagtactcgtatgatcttgtctgttggagtagtcgctacttgtactggcatgtgcacgcttccatgtttctactcctacaagtttaatactagtactaatatatataccatgtatctactctacgagttcagtactagtatatgtacaactcatcgtgacagtgtgagtagtaagcagtgcgaataatacttgatacacggtgaccgaatgtagtaaagtaaagctagcctagcatgtaattatttttcggaattgctaaaagactgtcccaggttttttttgaggaaaaaaacttttaaatgtaactatagcagtacaaacacgcccaccattattcttaataaacgcacactatacatctaacgagaccatatatgaattgaagtgatttgttctttaaaatttagaccagtacagaccggttttgcaataattacgtacactacaaattttgaaatgaatatgcttatatgcctcaattatttgtctctgtctggttcctgcgacccagtgctcattgtgtctccatagcttggacaaggacaacaatgggtactgtggcaaaagtagcatgagttaattaataggcaaaaagttaatcgcacgagttaagctaagccctgaattttgggcgatgcatgattgattgctctagggcttatggagctatggtcattgctcgcatcactgaagtactgcttcatgttactcatgtggcctccttgtctcctcgtcattccctgtactgttaatccatgtgacattggtgtatatctgttgttcctaccctgattctcgtccttcatctagctggaaatgttataccttaagaataacaaatcacaaagttggattgttaactttcggagactgtctgctagctgcctagctggaccagttcctcaataatttacatattcgggaagataaaaattccatgtgccaacatttctgtcttgttttcaaccttaagatgaacatttcaggtcttgaaacccatctagaaattgggaataaatttttgacagaactttacaaattcaaacaagaactttaggggcaatttcctttgcttcgttgctcacgttgaatatcttttgtcccttgttgcctaggaaggagcccattctacgatattaaacttctgcaaatgtctaaaaaataaaggaatcataaacttcaagctttaatatagtttaatctgaataattacatcaaatgtttcgttttccaacattggcctcttctctttgccagcgtgtatgccattctctgtagtgtgaattgatcaatcttcctcaaattcactacttcttccttgttctctgcagcttcaggttcttaggtgtagttttattttgcttgtttaggacttccttaaagaattgaatgggtaggaaacgctcattctcaaggttaaggctgtgttcgtttgtgtgagatagggtgagaaaacacctcgttttccgtgcgcacgcttcccaaattactaaacggtgtgttttttgtaaaaattttctataggaaagttgctttaaaaaatcatattaatccatttttgaaatttaaaatagtttatactcaattaatcatgcgctaatggctcacctcgttttgcgtatcttcccaatcttttcaatcccctatctctcaaattgtaacatcctgaaaattctcaataataaaaatcactaaaattttgaactttttaaaacttttgcatcatgctggttgttataactgctattgctttccaaaccgtaaatgattacaaagaaagtaaagaaaagaactacatttaagcaatagatataatttaagagagtatattatttatgtttaaccctacaagtatttatgcacaaaagttccaaattgcattcgggggttgaaatttaatagattaaacccctccataaaataaactaacatataaataaattgagctaatgtgttactgcgttaataacggtctcattaggaaattatagaatctttaataaatcttaaatatcggacaatattaaattttgggaaaattcacatttggacacttaatatggtcacccaaatgcttaggagtaatacaaatttaatttataacttttcccaatttataaatcaaccaaagccctaaaagtaggaaaataggaatacttagaaaaatatataataaaaataaaaataagttcaatattaaatttgaatacaaatttcaatggaataacttaggattggtgtatttttacattgtgacaaaattagtggcaacaatatatttttcctaattgcaaagtaccctctaaattcaaaaatagttggctagcactgttcattagcccctaggtgttcgatttggtttctagccatcctagctctctttctccccactgttgcgccgccctagccggcctcgagccccgcccgcaccggcgccgtcgccgtcgcctcgctctgccaccgctgccgcgccgccgcatcatgtcgcgtcgccgtcgccgcgccgtctccaacccgccgtcggctgcgccgcgccgctcgtgtcaccgtcgccgtcacccgcgtcgcgccgagcctcgcaccagtcgcgtcgccgtcgccgtcgcatcagtgcctcgcgccccgtgcgccgctgccgcgccatcgcgtcaccgcgtgtcaccgtcgccgccttgagccccgcgctgccgtgcgccatcacgtcgctctcgagccccgtgtgccatcatgtcgtcctcgagccccgtgcgccgtccgtcgcgtcgactattaagccacccttcccacaccctataaataccccctcccatctcccttcctccccacacaccatgttggctgccatcacaaggccccaagagcccccacgagctcgtccacccctctctgcctcttcttctcccttgtatgcattttctcaaacaccttgtgtgcatgccggcagcttcttctccgctccaccaacgccgccgagcttcgtcgttcctccatctctcggtaagtcctcgctcctatgtcctctcctagttccgtagaaactagagccccctttaatttcgccaattagcaaccgtagccatgccggtccggccaccgttttgccgccggtgagctcgctgtggacaggccatcccggagcccctcctctccatctagccagcaaaatggaaccctcacacgccatagatgctgacgccctcaccaattcggtcggaaaccctccttatcgccttagcacctagctacccgtgcccggccatggcggccttgcagcgccgctcgcccccgcgccgtcctgcgccatgaccgccggcaggtgtgcgccgtgaccgccggcaggtggacgccagagccttgccgctcccttccctggtcgctgtcgggtcaccctcgcccgggcctagccgcgccgtgctctgctcggccgatggctggaggtagaagacgataaagaaagaacgagagagagagagcagtcgggcgcacttgtcaatggttcataggatttgctttagaaaaataatccagtaggaaagcaaatacaatcctaaaccccacatgtcagtcacttggagttttggataaagtttaggaataaaaataatggattaggaacagtacctttttacaatttctcagatttattcaaatttgaatctttaaactagcgtaactctctcattttaactcggatttgagtgaaacttgaacctaaatttatctaaattcataagctttccaatggtatataattcactatttgataaaatacatttataattattaaataattaatactaagataatgcataatagtcaacttaaaaatgtgctaacaaataaaattagtactttacagtaaggtagatgtaagaatatttgtctttaacatgctttgtcaatgtaacaaccacacaaactaattttaaatgatgtctcaaattaatgtataggaagatactagtactattaaatggttgtataattaaaccccatgacttatagattatttaaataataaagttagccttataattaggtaaatcaaacatgaatacagatagatgagtctttaatttatttatgaggaataggtacagaattgttatgatagaaccacccaaataaggttgagtcggttagcatccaataattactcaaagagtaaaatcacttgccaacccacttaaatcacatatattgtacaatccatttaaaatcatacataataacaataacctacctttagcatatattaaaccaaggagtatatgacaaacatgtatggtggataaatactagttataaatcttgacctcatataattatagttcaactgtaagttaggattgttcattaagggataatctgtaactataatatgattaacctaaacaactctaacatacaaagcatggataattattaaccttttctaatttatcgtgacaagtaaaatattttcataattaaagcaaagcctccatcaataaaataataatacaaatggttccctgcgattaattgcttgatcccaaatccatctaacaacagaacctctggtatgtaaccgtgctatttagatagatgcatatatagccataatccttccatagccatttgatagaataaatcgccgattagccaaatatatatgtatcccataaatgctatgttggttaactcctaaatcgaccacgatgacaatagaaagattaagaagccttagccctagcatgattgaaatccattagcaaacacgaatagtatgagcaaccctaggatcgaccccaacaattatcttttgcttgtgcatatttgcttgttgtttgaatattggtttttctcgcgtattatagaccttgtgtatcggttagtcgtgaggcaacgtctacaacttccaggaggtgaaggttgatcaagattatatcaataataagaattatcctgagcaggcaagtcatcactattccttgaacatgttgatcccaattgcgaaaattattttgtttacaaataaaattgcatgcaatgatgaacatcctacttgtgattatgccatgccttgattattgtttacccttattcccttgtaaccatgattacgtatgagtccctagtcaactatgacaaatgcttagaaatgctactctagaatcatgcattctcatatttatcaaatgctatatgcttgggcaattacctttgggaaggtattgagatgcggcatgtggagacataagcgccacattgccatgatgttgatgacatgatttgtgaaaggagaaataaaattaaacaactgttttcgactggggcggacggaggatttgggtggtatccggaaaaggctagtatcgtccccggtcaattaaggaccgagccatgaagttaagcatgaaactacccccgtacaaccgcacttctcgtatgggtatagacctagcggagtagatagctgagtggaatccatgcatagtggtttcttgatgtgtgaggcaggggctctacggtggggcagccattggtagaaccgcgaggtgggtgtctacagtggtgtcgccatcggtaggactgccatgtgagaatttaaacataattataacttaatgcatgtgtgagtctttccttcccgggtgcgctagaactcctctcactgctagaaaccgtgtacgcctagagtgcatgaggatgtaaagttcatggagcgggtattgccaatgtgaggttatcgaaaagctttgccgtgacgcgtctcatgtgttgggacgggctcatgtgttgggcagtcgcgaagtgcgggtaaagtgtacatccactgcagtatgagtaaaccaaatctattcgaatagccgtgctcgcggttattgagcaccgggacgtgtattacacttggctagactctaaattcttaacttgtgtgggatgggttattgcatgatgattttatgctgatggagccacttcctgagaggcgggaaggtggacgtcctcagaaaaccatgacgattcaatggcgggaagctatccatgggatcacaatggatggtggacagaaccatcgttatttaatgtgaacactggtattaaaacttgatcagtctatgctaggtctcaggcttgtgaaaagatttgcaaagcttgctttacgcaaaagaacctggagcccttccttgaaataccctctatcatatgcattgttgctgtggtggcttgctgagtacggttggtactcacccttgctatttatatatcttttaggagagtgttgaagagaagcccttgtcggtacgcttgcgtatccaacaagatgattggagtgcggtcttgttctaggtctcgttccccagtggactgcctgtggcatgttaaccgggcccttatattattttgtcttccgctgttgttctctgatagttgttggcccacctggctctaatgtaagtatttaactcttttagcctgaattcattcgtgatatgttgtgattcaactatgtatgtgtgtaccaactactgatccagggattggtacggataaacacagatgatttccgatttccaaaatcgggggtctacacaaactcaccctaagtccactttggctgtgtttagttccttccaaagttggaagtttgggttgaaattggtactatgtgactgaaaagttgtgtgcgtatgataggttgatgtgatggaaaaagttggaagtttggatccaaagtttgggtctaaacacagcctttattctaaacatagtgaaagaatgatttaccctccttacatgtgaaacaaaccatttaacacctccccccctcctctttccaactcaaaccaggataatatcaatcctacttgaaacacgttataaaaatatagtcaaacccacatgtcatccctatccatcttcttcctcttttcccatctccttcgccatcatagtccaacgagctaggtccacttgtcatcacctctctagggcgcccctgtctccttgcagaaacactattcaaacaataccaacgagagagagcaagagatatgagagaaagggtcattcctcaaggcgacaactttgtgagaggatgtcgtagcgaagactcgggaatgatgagatggcagtggactggatgacagaggagcttgccttgaactagctgttgaatagtcccacattggttgtggaagggtaaggatcctaatatataagtgggggagcccttcgcctcaataactagcttttggggtgggaaagaccctttacgatcctacactagctcccctattgagctctctcagtggtaccgagctcgaacaaccaccacggactcctccaagctgcaaggccatttgccacaaccaccatgtaccatagttattaagaccggacaggataatgaactggtcgagctctcggttcacctgtttgatggtccgaccaggttaggccggtccaaccgcggttcgatgtataatatgacgtaaatgtctcgtaccaacataagtgaatagatggagggttggctagcgcgtgctgctctcagccatgtgaccgaaggtcgaatccccactcccgcaccctcttctagcgatttttggtggggtttgctcagtgggcctcgcctcagcccatcaacaaaagccttacccggtctgaccactccagttcaaagcccggtttatataaaaaccgccggttcaattgcacacccgatcttttaagaggaccggacctgtcgaggctgaggttccggtttttcccggtcgggtcctaataactatgccatgtactagtccgagttgcaaggccaccatttgtaggacccccggcaaccaccaccatgggactacttcggagctccgagctgcctctaggagagcgtcatcgctatgggaagagatggtgctgccatataatttccctcctctctcaccatcctacttcccatctagctcatcatgtcagcaccaccttgcagtcatgggagtggaggttgcgaatgtgacgaaggttgttggaggagaggggagaaaaataaaaagggaggaagaagatgaggagtggttaaatggtggatctcatgccatattggacaccacataattccaaggccactgtgtgttgagtaaaggggagtaatttgtctagttttaagagttagtggatgttaaatgtccggtttcatagttgaggaggttagtcaagcttaacgcttttccttatagcctttacacctccatacttaggccccctttgaattggaggaaaaatggagaaaaaacaaaggaattgaaatcctacactattcatgcctttgattcgtaggaacaagaaaaggaaaaacgtaggaaactttcctattcctacaattctagagcaaaaacgtaggaaagttaacatccactctaacctcttggaaaactttccttaagtctatctctctcatttgattcctgcattttttctgcggtctaatcaaacagtcattcctatatttttcccgtgttttgcaatcctctgttttacacttgcattcctaccaaaatcctgtgtttttcctattcctccgtttttcaatcccgcgattcaaaggggcccttagagtgtggatggtaaggggctttatcaaacttgatgtagcaagaacacacccgacctaagagtcgataatcttgtctaacccgatcctgatcgccttcatgagcacaaaataaatgcctatgatgtgcccatcgagaacctaatttccaatgagtttttattgggtattccaaaccattaatagtatatccatgctcacataattaaaccaaactgacatttgaccacaagctagcaaatattaagtcatcaacattccaaaccaaagaatgcaatttacaacattctaaataagagttcccaaatcagcattaaacacaagacggaaacacatatatcaggtcagagcaaggattatccatgggcataaaacaatacccatgattgcccgtcaggatctgtcatacccaaggttagaaagctactccgtttacccatttaggttcgatttgaatcgtagaaataaaaaaaaaacatagaaatagaaaaaatataggattctgacatgaatgtaagtataaaacagagaatttgcaaaacacaggaaatacatagaaatgatcgtttgattggatcatatgaaaaacaatggaatcggatgagagagatagactcaaaggaaatttttgaagagctttgagttcttgctaagtttcctctaaaatctctatagtattgtccattacatagaaatttcaaatgattagataagattcaattcttcgatttaaaggtattcatataatttttctttagtattgaaattctccaaaatttatatgtttttcttccaaattaaatggaccttacgattgtttccataactttgagacaagttgctatatgtgtttgctctaatgaaacagcaaaccctacaattaggcgagttgggatcattctgacttttcagcccatcctcccttctgacagctcgattacgcaacgaagaagagcccactcagctttctgatcatttttttgcctgttctactggatgcaggccgagagagagagagagagagacctggtgccactgaacgaagcacagctatagttttgctgctctagctctccctctctctaccgcttgcatagtttcattgcatggctgtctgggtggccgcacatcccaccactgttgctgtgcctaaaccttatcttttccccatataaccagctcacaccgctagagagaaagaaacatacgcatcccaccaacgcgacgagctcagaatctcagaagtcagcagcagcaaagaggcgataagtagccgcggctcaccgttcgttgcccaaaaccacccaaaagcgtagcgacacacgagaagccaccagccaacgtagtacgcgccgagagctgaggccatccacgacacacgaacatgagcacactagtagacgcgctgtgcgctccctgcagcgacaccgcgctcatctacgacaccttcaacgcctccgccgccgcgagcttcctcttcgacaatgccgccgccttctgcgacgctgacatcctcggcgccacggcgacaggggagaaggaggcgacgtcgtcggccgcggccgcggccgcggaagccgccccgccgaggaagaagcggcggcggcgcgcgaagagctgcaagtcgcgggaggagacggagacccagcggatgacgcacatcgccgtggagcgcaaccgccggcgccagatgaacgagtacctcgccatcctccggtcgctcatgccggagccctacgtccagagggtacgtcgtactacgcgcgccggcacacgtctctctcgccctctctgttttggttttttttagcaaaccgacatcgcttcgtgtcaagtgtttctaccctcttttgttctgtatatctgcgttgctcccatttgtcaaagagcaagaaagcgatgtcggagcaaccggcgaggagaacggcgatgagagaatgtttggccgaaagagactcccccgccatggcgccattgtccgccgttactcatggcgtatcgtctctttactgctcaatctcttttcatgaacagaagcatccattctttgcacagaaaccttctgcccattaatgtgtctcccctatcattaattcactcgtacacagagagagttgcctggatgggcctgtcatgtcaaaattaatgcgttcttgatcatttttaaatgttgtgtagggcgaccaggcgtccattgtgggaggcgcaatcgagttcgtgaaggagctcgagcagcagctgcagtcgcttgaggcgcagaagcgaacgctgctccctcaccacaaggcgagatgcgacgacgcaacgccgatgcataacgccagcggcagcaacgtcggggccggcggctgcatggagcccacgacgacaacgagcaactgcagcagcagcgtcaccgaggacgcgccgtccgccgacgcgcccccgttcgcgcagttcttcgcgtacccgcagtacgtgtggtgccactcgccgcgcgactccaccaccaccaccaccgcggcgtctgcgtcggcgtcggcttcggcgtcgtcgtcgtcgccggccacggtggcggcggcgctccagtcggagcaccgctccgggttggccgacatcgaggtgagcctggtcgagacgcacgccagcgtccgtgtcatgtcaccgcggcggccagggcagctgctcaagatgatcgccggcctgcaggccctccggctcaccgtgctgcacctcaacgtcaccacgctggactcccttgtgctctacaccctcagcgtcaaggtacgcctacgcctatcgcctgcgtctgcagccgtgcactgatttcagttcttttttcaacaaaagtgcctcaattttcggccactgcatttcacacgcatttcgcgctgaaacgcgcaccgatgcagtagctagccaggcgctcaaaccgagcgataccaccagcacaaacgtttgtgcgtgtctccatgcatggtttgggaatcatatgaggtcacttcaaccgagttaattaatcggagtaatctgggacgattattagagacggtgtttgattggtatagcgtctgaaaagaaaacgtgtcagatattctcctgcctgcactgcacagcacaggcataggtcatcgcatcaaggacgcagtcgtgcaggcccccaaacagtataatgaacagaaacaagagatgagcagagatggagatcgcttcacccatcggctttcgatcaagcatcattgttcgagacgcatcaaaatttctcagaatttgatcgaatccgatggacctgactaggagcctgagtgcctggccacctgagtcctttcctgcttccccttctcgcttgttgttcgcttttgaccggatactccgtaggagtatttcagtaggagtaggcaggtcgggcccctgcagccaaaggacttgtcaagtccaaacggtgagtagcgcacagtactactagtggtctggtagtcctagtaagcactggcctaagctgtgcgtagtgtgacgcttcacgaaaaagctactgcatcagtcagtccagattgtgtaagaaaaacgctgccacggagaatcctttctgctgagctgagccatgctatagatttcgactggcatagagaactgagcagaaaaggctatagctacagtaggcacaagtatagcgctggtgttcagccatgacagtgtgtgacagttccccgatggaatctgtgtgggagtagtgctaatctacggcattttttttgcgacttagtggcagattccttcgctccctaaccggccattgcacatgcacgcaatctcattagttctcgtctaatcctaatcttgtctttgcgtggccgtgtgctgcacaggtggaggaaggatgcagcctgacgacggtggacgacatcgcggcggcggtgcaccacgtgctctgcatcgtcgacgcggaggcggccgcctcggagcatctcctcgcggcggggcaactggccacgacggcgacggcggtggcgaagagagaactcgcgacgtacatgtactgagccgctccaagtgccttacatgtcgtcgtttgtgtggtcgcgtgtactgtatgccgcgctcccgtttttctcccctttttaggctcgtcacgtttttgctgtgtagtggcccggcaggttagatctagttctagttgtactagtagatgcaaaatgctatgtgtccagtagtcccagcctctcgacgagggcgtacttgtctgtttctcgttctgaaaacagaatgttgtattgctgtacctgtacagtatcctgcctcgcctttctgtaataagagcgactagcgagtagcgacattggaaggaacagttcgagattcgtattatccgaacagggccttatgagggtactagcttacaatgggccatgtgagttaccactgcttcatggcaagggcgggctttagcctactcaaagtccatcaaccgtgtgatttgctcgatttgtgggccgtgataaggccgaaggccagcttgctgccaaatctccaaccagccccgccgaccaccaggagcaaatcaacccgtttgacggtttgaaaagtggtctatactgatatggcatgttgatttggtccacctgtgatgaatgaactttgtatggttatatttgtagtaccacatctatatctatacctaatataaatattcggattttttctgtcgtcacatccttttcaccagcgatttttcgtcccgcgttatccgatttcttcccaccgcacacaagtatcacgcacaaaaaataccccacaccgattcctacttcaatttgccacattaagcccacaagcccaaattaagatagatgaggcacttcaatatttaagattggaaacagtaaaattagagaaaaaaaaataaacgaaattgaaggggaaaaaaagcctaaagtaaacaacaaaatcaaaattgaaatccaataaaacacgcatggattcccagctgattcgtctcaaattcacctcatcgggcagccaattcatcacaaattcaatcacaagaaaagagtaaataaaataaaagagagggaaaaaaagatcaaacccaataaaccacccacagattcgcagtcgattcatcacagactcgccttgtcgggcaaccgattcatcacagattcaatcacaacaaaggggaaaatcaaaatcaaaaagaggaaaaaactgcccaaaaaaaaggaggggatggtggagcctcagcgagcccaccaccgccacccgcgaccgctctcgtcgccgtcgtgttcaccgctgcagcactgtcacaccctgaagttctcctcccaagcctaaaatttaatttataaatgaccctaagaaaatgctggtgcaaatcaagagaaaaccctaagaaaataatacaaataataatcgaatctggcatatggaatttttcttgagttctacatgtagaaattcattaacaggattttagtggaattttcagagccctagaaataaatttaaccaattaaaattgagcaagcaatattttaattccagggaaaatccttttcttcctttttctttttctttttccccttttcttttcgggtgggccgccggcccattctccttcctcccctcccctccactgggtcggccgaaggccaaagcccagctaggtcggccgcctccctcctcccacccgggacgccgacaggtgggccccacctgtcgggcccgtctcctacctcgcgcccgcgccgccgcgcccgcaaccgccgtcgcgcccacgcctccgcctcctccgggccacgtcggccacgcccgcgcgtgcgccgcacctcccgcgcccacttccccctctctctcgtccgctcccgcgcccgagatggccgggattcgattttcgaatcccgcctctctctcctctcccactccccgcgttggccggcggaatcttgcccctaccggccacgtccgggactcccctcccctatttaagcttcccgtcgccccctctcgctttttccctatttcgccgaactccctcgtgctccccatcgctcccgcgccgtgaaaccacccgccgccgccgcttccgttactccggtcgccgctagccgccgctagggtcgccgccgcaccgcgccgtcgccgccgtcgggttcgcgaggccaaactccacctcgtccgccccttccccgtcgggattcgtcgccggaattcgcatcccctcgcgctccggtgagttctacctctaccgccgccttcggccatggatgccggccgccgtggttcatctccctctctctaatatctctctcttccttccttagggcaccccgaagcccgtccgccggttgccgtcgtcctcccgtggctcgccgtcgccgttcgccgtcgtcttcctccgcgccggccaccctcggtgaggcgtcctctcccctctactcccctccctctccctcctagtaccgcgccgccgcttcaagtcatgcgccgtcgccttcggccgccgccgccgcctcccgtgccgccggtcgccgtcgccgctagccctggccggccggccggctttgatgccgagccgagcccggcggccgcctctatcgccaccgcccgatcggctcggggccgatctgggccgtcggtcccgtggactggcggtggaccacccacgtggtcccggtccacggtggaccggccccccctttgagccgctgaccagtgggacccgcctgtcggcgccgcccccctgatgacgtcagccctgggagttattgcgcaataaattatttaaggactttttgttatagtaataaacacagtgaatcttctaaaattcataactaattcatccgagctccgtttaagcccattcaagtctcagtaaatcaagaaaaatgtgtagaatccattaaaaatggttttgttctctgtttcagtagtcttatagtctgtttgcaatgtttgccttgtatgtcgctagattccggttcttccgacgctccgatgtacttcgaaatagtcgccgaggttcctccagcagcagagcaaggcaagtcatgcttgtcacttgatcatgttgatcctatattgcaaatgttctaatgttttctttcaaatactgcatttgttttgcaatatcactatgggatgtttacctattgttacagccatgctattttggtaccttgctcctttgttagctcgggttataacatgaatagaccttggactaggagttgcttagccatgcttagttcaactagcacacaatggggaaatctcatttaaaatatagactgtaggttcatatgataatgttggtttagtaccaccgctttggtgttggttaattaaaatgaatcacatggtgggctgtgggtgcatggttttgcttgttgcacccagagcaattaaggaccggttcgcgggaaaccctggaagaatttatcgtgcttaccacaagccagcgtgggcaacggctgggcttgtagtgtagcttttctctagctgacgcatccaggcaagggtgggcgtgatggagtttggatgggccctgcgacggcctatgcggcttccggattcacctaggcacgtgaggggactgcccgtcgcccgctgaggacgggggtgaaacctgaggtgtgatgtgcttggctagagggggttatgcgaagggtcttgtcacgacctctttccggtatgtcgtggtggcatgtcggcgcacggaaacttgtcgtggggctgtgtcttgtgggtacagttgtacacctctgatcagagtaaaactattcgaatagccgtgcccgcggttatgggcggtcaaccagattcaccgtgatttgtctcaccctagtttagtcttttgaaattggatagtataggtggacgattaggcctgtcgcaacatggtatagcgttggacggtggatgattaatattgattaattattacgactgttttcttctttaaatttctgtttataaatgctcgctttatgcaaatgaaccacgctagctctcctttgataattccctgcatcatacccctattccggtatgacttgctgagtacagtggatagtactcagtcttgctctatttttcccaaccccagagtacgagtatgtgtcagatggaggtttctccgaggagtaggcttcgtccgtgccgtcgaggatgcctgtggagtggtgttcccgctgcagttctagtcaaggcttagctcctgttgtctttcgttttttccgctgcatttttgtaagacttttataatgtttgtaagacgtggatctgtatgtcaactttgtcgtttatgtaccccggccggtcctggacggggattttaatgcacattctgcttggaattctattcgggaatttctgggtgtgacaagttggtatcagagccgaccttgatcgtaagccaaatgggaaaaacctaagagccctctgaatccttttcattccatatgttctttgtaattggatttgttccgggaaaattgggatctgttcttgtggttcaagggaaaaatcttggtcgctcgtttaagtgagatttgtcaaaacaagtcagtctagggttttagtaaaattattgagatttattcgtcagtcagttgggatttgatgggtgaaatgcattaggtcccagctcaggaatatgggttgcaaggtatttatgctcttattgttattattagtatgtatctaatttccccatcattttatcgttatgtaagtctgtcttatttattcgccctcatgcaaaatgatctatacataaaatttcgctcttattcgatactcttatttgagtcctttattactttatttaaattggatttgagcatgcattgatcctactcctttgtcttctctagatggccggccacccacccaaccaccacggagaaggcatgattgactttgtggcagagttagcacgtatgacgctggtggtgggctaccccaacgcgccggagtacacgactgttccaccgctcagtggcgagcttccccaccgtgtccgcttggaggtccatggctacgtggggacttgcctcgctaacatggtggttgaggcgtccggaggcacagcagatcacgcctgtcaggaggcagcatacctgatgatggccagactacgggagtgccacaactacatcttccatgacacggcgtatcgatttcaccctcgtcgagccagcggtgatgatgtcagtaccttccgtccaatagccggcgagaacgacaccacctttgatcacatgtgcgccgtgatgagggggatggacaggatgcacttggacctgcacaagacgtccaaggccttgaatgatgggaagctcatgaggatcgtcgttctaaaggacgagatagcgcgcttgaagagggagaatgctcagttaaagggtcttcccgcgccaggaggagtccggatccacactacgccccgcaagtcgacaacggcacccgtgcgcatccagcttgcgcccaggaacccacctccgcccgcagttcccgcagcacctccagttccgcccgcagctccagcagttcccgcagctccagcgccagctccagctcatgttcccgtgtcagctcctgcatccgctctctccttcgcgcctgcaacagccgtcaggggccccgccagtggcaatggaggttggttgccagctactcccagtggcagtcgcgacctcagcagcagcagctccagtggctcagagctgggtagcggcgagacttatctgccaggctccaggagtcgctcagagggacgtggtgacgagcaggaggacgcctttgactccaccgaccgcaggagccgttccgagcattaggctcgttttccattagcttatcgactgtctagcttttgcttgttagtttgtgtgtttaggttgcttgcttggggtcagtcgacggtcgatatcatgtgcctatgatatggctgtctcaataaggatttttgcttgctgtttcaagtgttttaattcagatcagaacaattgcagtttaaatttctatataataaagcttagttcctgagtatctgtttttctccgtttccccgtctactcttcctccagatggtctacaccaggactggcacccgcacgacaggtgagggcagcaacggcgaagaacgcgctgatggtgtgcatcccaacagtgattccggcaatggtccgccaccacttcccaagaatccgacgctagcccaagtaatggcacatcagactcagatgatggcagccatgatgcagcagatgcagcagcagcaccagcagatgcaccagaggatgctgcatgtcacgctctaaagttcccctttccagctttaaaatttgtaaaatgaatcgtccgaagaaattgttctttttaacctagagatgaatccctaattaataaatgcaaataataatcagaatcgacatgtggaatttttcttggattcgacatgtcaaaatatgataacatgatttttagtggaattttcagagccttggaaataattttaaccaattaaaatgagcaaagggcaatattaaatccctggaaaaatcctttcttctttttctttttctttttcctcctttttcctctcttcttgggccgtcggcccagtctattcgcctcccgcgccggccttccctcggctgggccggcccaagctgactcctccctcctccctaacccctccgggtcaccgacaggtggggcccacctgtcggccccttcttccaccttccgccgccgctccccaagccggcaaccgccgagccgcccacgccgcccgcctgccccgccttccacgccccactccgcgccccgcgcccacgtcgccgcccaccatccccactcctcccactcgcgcgtgcaccccgcaacggagggattcgaattcgaatctctctctctctctctccattccccacgtcggcgagaaatccggccgcctcccggcctcgtccgcccctctcgagcccatataaaccatccctccactcccctccaccttttcctctttccaccgctccctcccgtgccctctatcgctcccgcgccgctacaccggccgccgccgccttttccactcctccgggcaccgctcgccgccgctggagccgccgctgagccaatccgccgccgccattagcttcgccaccgccaaagctaccccggccgccgcatccccatccaatcccgtcgtcggggcccgcttctccccgcgcgccggtgagtaccaccatagccgccgccgtcggccatggctctcgctcgtcatggacaccctctttccctctaacctctcacacttcctctcttagcgtgtcccggagctcggccgccgttcgccgtcgccctccggttgctcaccgtcgccgtttgccatcttctcctcccgcgccagccgaaccccggtgagaactccctccccttctcttcctcccgcgcgcgccgccgctccccgcatgcgcgtcgccgcgatgcaccgtcgccgcgatgcaccgtcgcccgcgtcgccggccgccgccgtcttctcgccggccgccgccgtcggtggccgcttgccgccgccgccctcgccataaccggccggccggcttgaagccgagccgagccaggccgccttcctccttcccccaggagccgtcgcccggagggccccgcctgccagtacccctccctcccccttgagccgctgaccagtggggcccgcatgtcggcgccgccccaccccttgctgacgtcagccctgggatgaattattgcgcaataaatacattaaggctttttctttattagtaaaaacacagataatcttctaaaaatcataactaattcatccgagctccgattaagtccattcaagtctcagtaaattcataaaaatgtatagaatccattaaaaatggttttgtttcctgtttcagtagtcttatagcatgttttgcttgtgtgctttgtttgtcgcgtagatttcgcccgtttcgtcgattcgcggtttctcgaagacgttgctctggttccatcagtgcgagagcaaggcaagtcatatattataattgatcatattgtacccaatttacaaatgtcccgcatttctattaaatattgcattgttttacaatatcatgtgggatgggtcgtattactcagctatatgttgtttcccttacgccattgataacttgggtattaaaatgactagatgttggtttaggagatgcttagccatgcttagttcaactagtgcacaaaaggggatcacattaaaacatagactttgattattggcaatagctttggattagtgccaccgcaatggtgttggttaattaaaatacactacatggtgggctgtgggtgcatggttttgctagtcgtgcccatggcgattaaggaccggttcgcgggatgccctggaagaacttatcgtacttaccaaaagccagcgtgggcaacggctgggcttgtagtgtagcttttctctagccgacgtacctaggcgagggtgggcgtgatggagttgggtcggccggggtgtccggttgatcggcttccggattcaccgtggcacgaaaggggggctgcccgttgcctgctggggacgggggcgaaccctaaggtgtggtgcaatcggttagagagggttatgcgaagggtcctgtcacggcctctttccggtatgtcgtggtggcatgtcggcgcacgggaacgtgtcgtggggctgtgtcttgtgggtacagttgtacacctctgatcagagtaaaactattcgaatagacgtgcccgcggttatgggcggtcgaccagattcaccgtgattagtctcacccctagtttagcttaatgaactggtgtagtttaagtggttggttgggcctgttgcaacgtggtgtagcgttggacagtgattggttaatactgcttaattgctactactgttttactgcttttaacttctgcttttaaatgctagctttatgcaaaagaacctttagcccccttggatatatcctgcatcatacctcctcttccggtacgacttgctgagtacagtgggtagtactcagtcttgctcttttcccccacaccagagttgaagttcttctcagttggagatgtctcgaagaggttggtttcatcgctgccgtcaagggttgcctgtggaatggaatcgcccactgcaggagtcaagtcttcaggcttagctcgcttttatcttttttcgctgcatttgtaatcttttatatttttgtaagacgtggatctgtatgtcaacaattgtcgtttgtgtaccctggctggtcctggacaggggtttaatacacattcagcttagaaattctggttcgtgaatttctgggcgtgacactgcagcacgccgaacagcagcaccagcagtttggtccccctccccctcagtccaagttgccagagtttctacgtatcaggccacccactttctctagtaccaccaaccccatggaggcaaatgactggctccatgccatagagaagaagccgaatctcctgcagtgcaatgatcaggagaaggttgctttcgccacacaccagcttcaaggtcctgcgtcagcttggtgggacaatcacatggccacccgcccgccaggcactgaagtcacttgggcggagttctgtcgtagcttcaggaaagcgcaggtgccagacggggtcgtggcacaaaagaagagggaattccgggcactccaccagggcaacaggacagtgacggagtatctccatgattcaatcgcctcgcgtgatatgcaccggaggatgtccgtactgacgccgagaagcaggagaaattcctagcaggtctggatgatgagctaaccaaccagttgatatctggagattacgccgactttgagaggttggttgacaaggcaatccgtcaggaggatcagcgcaacaaaatggaaaggaagaggaaggcggcgcagttccggtccaaccaagggagccaccagcgaccgcgcttcactcccggacagcagggtagacctaccaccctgatcgtccgccagcaccgccctttcaatgccagcaacttccatcagggcgccagtggctgtcagaaccaccatggcggtcagcccaaccgcagtgcagctccgtgcccaccaatggcactagcacagtcagctacgtccgcgcaagctaagaaggagactgggacaaagccagggtcctgcttcaactgtggcgagcttggccacttcgctgacaaatgcccgaagcccaggcgtgccgggccaaggtttgtctaggcttgtgtcaaccacgcgtctgcagaggaggcgcaagcagcaccagaggtcgtactgggtacatttcctgttaactcaatccctgcaatagtactttttgattctggtgcaacgcgttctttcatttcaaagaaatttgtggggatgcatgggttaaggaaagaagagcttaatacaccaatgagggttcataccccgggaaatagttcaacctcggtcagttttagcccttcagtgctaatagaaatccaaagatcaccatttctagccaatctcattcttcttgaatccaaagacctagatgtcattcttgggatggattggctgaccaaattcaagggagtcattgattgtgtgaatcgcacagtcaccttgaccaacgagaagggagaaaccgtagtgtacaaatcactagtctcaccaaagcaaggggtctccttgaatcagattgaggcggaaatcccagtggtcaccgaggagaagaattcgaggaaattggaagagattcccatagtttgcgagtacccagaagtctttcctgaagacctcactaccatgccacccaagcgagagattgaattccggattgatttggcaccgggaaccgcgcccatttacaagaggccgtacaggatggcggccaacgaactagtagaggtcaagaaacaggttgatgagcagctgcagaaagggtacatttgaccaagtacttcgcattggggtgctccggtcatttttgtggagaaaaaggataagacgaagaggatgtgcgttgattatcgcgcactcaacgaggtcacaatcaagaataaatatcctttaccgcggatcgatgatttgtttgatcaactgaagggagctaaggtgttctctaagatagacctgcgatcaggctatcaccaattaagaatccgggaagaggatattccaaagatggctttcaccactcggtacgggctgtatgagtgcacagttatgtctttcggacttaccaatgcacccgcattcttcatgaatctgatgaacaaagtgttcatggaatttctcgataagttcgttgtggtcttcatcaacgacatacttatctattcaaagtctgaaaaagaacatgagcagcatctccgtctggtgctctagaagttgaaggagctccagttatacgccaagttcagcaagtgtgatttttggttgacggaagtcaaatttctaggccatgttattacagctcagggtgtggcaatcgacccatcaaacgtggagtcagttaccaaatggaccccaccgaagaccgtgtcgcagatttgaagttttcttggacttgcaggttattaccgccgattcatcgagaacttctccaggatcgcccgacccatgacttagttgcttaagaaagatgagaagtttaaatggacagctgagtgcgataagagctttgaggagttcaagaagaaattagtatccgcaccagttttgattctgcccgaccagatgaaagacttccaagtctattgcgacgcatcccgccacgggcttgggtgtgttctaatgcaggagggcagagtggttgcgtatgcctcgcgacagttgcgtctacacgaagggaattacccaacccatgatctagaattggcagcagtggttcatgctttgaagatctggaggtactatctgattggcaaccgctgtgaagtatatacggaccacaaaagtctgaaatatatcttcacccaaccggacctaaatctccaacaacgaagatggttggaactaatcaaagattatgacatgagcattcactaccacccggggaaagccaatgtggtggcagacgcattaagcaggaagagttactgcactgccctatgcatcgagggcatgtgtgaggaattgcagtaggagtttgagcatctcaacgtgggaattgttgaacacgggttcgtagccgctctggaagcacggcctacgctcgtcgatcaagttagagccgctcaagtgaatgatcctgaaatagcagagctgaaaaagaacatgagtcggaaaggctcgggatttccttgaggatgagcatggcacaaactggatggggggaaagattgtgtgtacctgacgacaaggaactgaaggatatgatactcaccgaggctcatcagacacagtgttccattcacccaggcagcaccaagatgtaccaagacctcaaagaaaagttttggtgggccagcatgaggagagaaatagctgaattcgtcgcactctgcgatgtttgccagcgagtgaaggtagagcatcaaaggccagcaggtttactccaacctcttcaaatcccggaatggaaatgggaggaaattggaatggattgtataacaggactgccccggacatcatcaggtcacgattcaatctgggtagtcgtggatcgactcaccaaggttgctcacttcataccagtgcataccacctatacgggaaagaaattggcagagttgtacctggcaaggatcatgtgtttgcatggggtacccaagaagattgtatctgatcgagagagtcagttcacctcaaaattctggcagaagctgcaggaagaattggggacccgtttaaatttcagcacggcctatcacccgcaaactgatggtcagaccgagtgagtcaatcaaatcttggaagatatgttgagagcttgcgctcttgattttggtggagcttgggacaaaagcttgccatatgcggaattctcgtacaacaacagctaccaagccagtctacagatggtaccgtttgaagctttatactgccggaagtgccgcacaccactcttctgggatcagacaggcgagcgtcaactgttcgggacagaggtattagcggaagcagaagagaaagtcagaaccatcagggaaaggttgaggattgccctgtctcgacagaagagctacacggataaccgccgaagggagctcacttttgaagcaggggattacgtgtatcttcgtgtcactccgctccggggagtacaccgttttcagacgaaaggcaagttggcaccacgcttcgtgggactatacaaaatcttggaacgaaggggggaagttgcttatcagctagaacttccatccaatatgattggcatccacgacgtgttccacgtgtcccaattaaagaagtgcttaagagtacccgaagaacaagctgattcggagcatattgatatccaggaggacctgacatatgtggagaagccggttcgtatacttgataccagcgaaagaagaaccagaaacaaggtcaccaggttttgccgagttcagtggagtcaccattcagaggaggaagcaacctgggaaagggaagatgagttgaaagccgcccatccgcacctcttcgccagctcctccgaatctcagggccgagattccgtttaaggggggtaggtttgtcacaccctgaagttctcctcccaagcctaaaatttaatttataaatgacccaaagaaaatgccggtgcaaatcaagagaaaaccctaagaaagtaatacaaataataatcgaatctggcatgtggaatttttcttgagttctacatgtagaaattcattaacaggatttttagtggaattttcagagccctagaaataaatttaaccaattaaaattgagcaagcaatattttaattccagggaaaatccttttcttcctttttctttttctttttcccccttttcttttcaggtgggccgccggcccattctccttcctcccctgtcacaccctgaagtttcccccattttcttgctttaaaaattggttaaataaattgcccgaagaaattatcttaattaacctagagctaaatccctagttaataaatgcaattaataatcagaaatagcgtggtggaatttttcttgagttccccatgctccaatgcattaacaagatttttagtggaattttcagagccttggaaataattttaaccaattaaaaatcaccaaagtgcaattttaaatcccaggaaaaatcctttcttctttttctttttcttttccttcttttttctctattgggccgtcggcccactccctcccacgctcggcctccttcctttgggccggcccgttcccctttcccctctctccgggacgctgacaggtggggcccacctgtcaggtcgtccccttcctccagccgctcgccccacgacggcaaccgccgccgaaaccgtccgcgccgccgccttctccgctccacgccgcgcccccactccgcgtccccacgtcgccgccctccccgccattcccgcccgcccgcacgcacgcccgcaaatgggcgggattcaatttgaatcccccccactctctctctctctccccccacgtcgtcggccaaatcggggggtttcccggccatgtccacccctctcgagcccctataaagcttccccgcatctccctctcccttttccccctttcgccgcgctctcccgtgcctcctaccgccgccgcgccgctcgacactagcgccgccgcttgctgccacctccggtcgcgcgccgcagccgctagagccgccgccgcgccaagccgccgccgcctttagcattgccgccgcgtgagccacctcggccgccgctcggtttccgctaaaccccaccggaacccggttctcctcgcacaccggtgccgccgccgcccgtccgcccctcctcatcgccaggtcgttgccgccaccttcatcctccgctccggccgccatactcgccggtgaggatcccccctcctccctcttcccctctctctcgtttgcgccgcctctctccacgcgctcgccgttgccttcggtcgacgccgccatcctgtaccccgtccgccgtcgcttcccgcgtcgccgattgctgtcgccggcgaccgtgcgcgtcgcctccggttgccatggctggccggccggttttgaagccgagccgagccgtgcctagccgccgccgtgccgtccgatcggcctcccggccgatccggaccgtcggtcccgtggaccggcggtggaccacccgcgtggtcccggtccacggtagaccggccaccttgagccactgcccgtggggcccacatgccggcgcccccttcctctcccctttgagccgctgacccgtgggccccgcctgtcggcgccgccccccccttggatgacgtctgccctgggtattattgcgcaataattaattaaggactttttctttattagtaaaaacacagtttatcttctaaaattcataagtaattcatccgagctccgtttaagtccattcaagtctcagtaaatcaagaaaaatgcaaagaatccattaaaaatggttttgtttcctgtttcagtagtcttataccatgttttgcttgtgtgctttgtttgtcgcgtaggtttcggccgtttcgtcgatccgcggtttctcgaagacgttgctgaggtctcatcagttcgagagcaaggcaagtcatgcaatacgtttgatcatattgtacccaatttaccaatatcccgcatttctattaaatgttgcattcttttacaatgtaatgtgggatgggtcctattcctcagccacatattggttaccttatgccattgataacttgggtatcaaaatgactagatgttggcttaggaaatgcttagccatgcttagttcaactaggacacaaatggggatcacattattacatagactctgactatgggcatagctttagattggtgccaccgcaagggtgtcagttaattaaaatattctgaatggcgggctatgagtgcatggttttgctggtcgcacccatggcagttaaggaccggttcacgggaaaccctgggagacttaccgtgcttaccacaagcgggagtcggtaactgcttgatctgaagtatagctcgaccctttcctaggcaccggtggcgagggtgggcgtgatggagttgggtcggccgaggtgttcggttgtccagttgccggattcaccgcggcgcaagaggggaccgcccactgccttttgaggggtgggggtgaaaccttagcgtggtgtggatggttaggggagggttatgtggagggtcttgtcacgatttccccctttgcagtatcatggtgatacttcggggcatggcgacatgtgtggaatcgtgtcttgtgggtacagttgtacacctctggccagagtaaaactattcgaatagtcgtgcccgcggttatgggcgatcaaccagattcaccgtgattagtctcacccctagtttagcttaatgaactggtgtagttcaggtggttggttgggcctgttgcaacgtggtgtagcgttggacagtgattggttaatattgattaattactacagctgttttactgctttcaaccactgctttgaaatgcctgctttatgcaaaagaacccctagcttccttcggttatatcatgcatcatacctcctcttccggtatgacttgctgagtacagtgggtagtactcagtcttgctctcttttcccccacaccagagttgaagttcttctcagttggagccgtctcagagaggttggtttcgtcgctgccgtcaaggtttgcctgtggagtggagtcgcccgctgctgaagtcaagcttcccggtttagctcgcttttatctttcccgctgcatttgtaatcttttatatttttgtaagacgtgggtctgtatgtcaacaattgtcgtttgtgtaccctggctggtcctggacagggatttaatgcacattcagcttagaaattctggttcgagaatttctgggtgtgacatcccctcccctccgctgggccggccgaaggccaaggcccagctaggccggccgcctccctcctcccacccgggacgccgacaggtgggccccacctgtcgggcccgtctcctacctcgcgcccgcgccgccgcgcccgcaatcgccgccgcgcccacgcctccgcctcctccgggccacgtcggccacacccgcgcgtgcgccgcacctcccacgcccacttccccctctctctcgtccgctcccgtgcccgagatggccgggattcgattttcgaatcccgcctctcctctcccactccccgcgttggccggcggaatctcgcccctaccggccacgtccgggactcccctcccctatttaagcttccccgtcgccccctctcactttttccccatttcgccgaactccctcgtgccccccatcgctcccgcgccgtgcaaccacccgccgccgccgcttccgttactccggttgccgctagccgccgctagggtcgccgccgcaccgcgccgtcaccgccgtcgggttcgcgaggccaaactccacctcgtccgccccttccccgtcgggattcgtcgccggaattcacatcccctcgcgctccggtgagttctacctctaccgccgccttcggccatggatgccggccgccgtggttcatctccctctctctaatctctctctcttccttccttagggcaccccgaagcccgtccgccggttgccgtcgtcctcccgtggctcgccgtcgccgttcgtcgtcgtcttcctccgcgccggccaccctcggtgaggcgtcgtctccccctctactcccctccctctccctcctagtgccgcgccgccgcttcaagtcatgcgccgtcgccttcggctgccgccgccgcctcccgtgccgccggtcgccgtcgccgtcggccgcgtgccgtcgccgctagccctagccggccggccagctttgatgccgagccgagcccggcggccgcctctatcgccaccgcccgatcagctcggggccgatctgggccgtcggtcccgtggaccggcggtggaccacccgcatggtcccggtccacggtggaccggccccccctttgagccgctggccagtgggacccgcctatcggcgccgccccccccttgatgacgtcaaccctgaaagttattgcgcaataaattatttaaggactttttgttatagtaataaacacagtgaatcttctaaaattcataactaattcatccgagctccgtttaagcccattcaagtctcagtaaatcaagaaaaatgtgtagactccattaaaaatggttttgttctctgtttcagtagtcttatagtctatttgcaatgtttgccttgtatgtcgctagattccggttcttccgacgctccggtgtacttcgaaatagtcgccgaggttcctctagcagcagagcaaggcaagtcatgtttgtcacttgatcatgttgatcctatattgcaaatgttctaatgttttctttcaaatactgcatttgttttgcaataacactatgggatgtttacctattgttacagccatgctattttggtaccttgctcctttgttagctcgggttataacatgaatagacgttagactaggagttgcttagccatgcttagttcaactagcacacaatggggaaatctcatttaaaatatagactgtaggttcatatgataatgttggtttagtaccaccgctttggtgttggttaattaaaatgaatcacatggtgggctgtgggtgcatggttttgcttgtcgcacccatagcaattaaggaccggttcgcgggaaaccctggaagaatttatcgtgcttaccacaagccagcgtgggcaacggctgggcttgtagtgtagcttttctctagctgatgcatccaggcaagggtgggcgtgatggagtttggatgggccctgcgacggcctatgcggcttccggattcacctaggcatgagaggggattgcccgtcgcccgctggggatgggggtgaaacctgaggtgtggtgtgattggctagagagggttatgcgaagggtcctgtcacggcctctttccggtgtgtcgtggtggcatgtcggcgcacgaaaacgtgttgtggggctgtgtcttgtgggtacagttgtacacctctgatcagagtaaaactattcgaatagccatgcccgcggttatgggcggttaaccagattcaccgtgattagtctcaccctagtttagtcttttgaaattggatagtataggtggatggttgggcctgtcgcaacgtggtatagcgttggatggtggatgattaatattgattaattattacgactgttttcttctttaaatttctgtttataaatgctcgctttatgcaaatgaaccaccctagctctcctttgataattccctgcatcatacccctattccggtatgacttgctgagtacagtggatagtactcagtcttgctctatttttcccaaccccagagtacgagtatgtgtcagatggaggtttctccgaggagtaggcttcgtccgtgccgtcgaggatgcctgtggagtggtgttcccgctgcagttctagtcaaggcttagctcctgttgtctttcgtttttccgctgcatttttgtaagacttttataatgtttgtaagacgtggatctgtatatcaactttgtcgtttgtgtaccccggtcggtcctggacggggattttaatgcacattctgcttggaattctattcggaaatttctgggcgtgacaagcacccgctccaaccgccgcctgctcctttgccggcccaacactggaagagggggatggagaggaggtcgtcaccgctgccggcgaagggggccgccaccacaaggagaggtggacggggttgagctggtggctgaccggagcgccccccctcccccctcccccccgattcgcccaccatcttcatctccacctcccgctcaggctcggagagaagcgcccgcagcggcagcagtagaggaggtcgtcgcacggggggaggtgagtgcctaagtggagcgtcgaagcggatcgaggaggaggaggggcgagcttgggaggggaggagaacggacagactgagggagatggggaagagaacataccggttgctctgtgggtggatacgtggattaggaggatgctgctctggtggatggataaggacgacgggttgcaaagcactgtagcaaaagtattgtaccttaaaataatattcagggtaatgtatggagtatggagaacgctgtagcgattgatcgatctggaccattgatgaaaatgcatgcagattgtgtttagttttctttaaacttctaaaaattccgtcacatcaaatatttgatacatgtatagagcattaaatgtgaatgaaaaaaaccaattgcacattttgcatttaattgcgagactaatcttttgaggctaattacgtcatgatttgataatgtggtgctataataaatatttgctataataacggattaattaggtttaatagattcgtctcgcagtttacaggcggaatctgtaatttgttttgttattaatctacgtttgatacttcaagtggtgtgtgtccgtatacttagattgttttttaaaaagaacaaaaacacggccgcagtcgtcaggagcagttgcaattagagctgcacccaatctgaatcctcgcttaagctgcatattgcagctgttaggcattcacagtgcacagatgtcgcgttctgtcccaagcaaccacgttgaagattcatcgccacgcacacgcccgttgttcccaactgaaaaccacggagccaaatgaagctacacgttctttgttagaatttggcaggcatggggcgaagcacggggcaagcgacgcattgggagggggcgtggccccgcgcgacgcccctacacccgtgcaacggcagaagcggcagcatagggagaagaagagaagatggtacggcggtggcctagggcggagaagggaagatgttgacggcggaggaagaggcggcgacagatccagcacctaacctcattgtcatcgtcgttccgtgctgcctcgaagcgtagcagtgacaaatcatccatgtcgccagaactcccgttgcgccgtctgtcatggacgcaccgccgagccctgccgccccccgttcacgcgccgtccgccggtcggaggaggaggagaggtggactcccacccaccgcttgggccacaacaccgccgctccactccactcgctgttggtcgaaggagaggtggactcctgggcaccgcttgggccacgccgctagagctccgctccgctcgttgctggttggaggaggagaggtggattcctgttgccgcttgggccgctctatgctgctcaccgtctgtcgtaggagaaggaggagagatggagccccacccaccaccaatgccgcttaggccgcgttgccgccgctccgctccgcttggccatctcccttccactcgccttgctttctcatgtgagtcgacatatgattttggaaaccagatcgcacgcttgcaacacgagagttgacagcttaagaaagcacgcgtcaccactatgagattgagtaaatatgcaaaagtaatcttatctgtcatgattatcattagttttatgataaacttacctattttaaatatagattttttttgttaatcatacaaatttatgtccatctattcttacgtgaaagtaacctaatgcattcacggtttgttcctcccatggtacaatcgttacgctagcgtgttagaaacatcgttcatatcatacacgtacacgtggaataattgtccaaacaaaaagaaaaccgttgtgattattattgtcatattagaccgcttaaaaaatcattcagttaaacattatccaacgcggcattacccggtgcaacgtacggacattttgctaatgtgtgtatatatatatatatacactaatataaataggaggagttttgccttccaatcctaccggtgaaatcaaatccaacgacccgtgatcatctaccttacaatccaatggctcaaatcactccccaacgtcccacgcggccacgcaacgatccccttttagtttctgcgctctctccctctgaatcccctgatcccccgatcccatcccctttcccttgcgaaccctagcctcttcctctcaagcgccgccgcagtcgtgttgcctcccgatcattcgccgccagatcaccgtctttgctgtcctcttaggtgcagccgctacgcacacccacggtgcgcacttcctttccccggttccccagcccagtgctgtccccctcccttcaccgtgcaaaaccctaagcgccgccaccacaagcaggtaccgttgccgccaggagatcgccctcatgtcacctcgcttcgccagatcatcgacgcaccgcctcgccgtaccggtccggcgtcgactccgcacacgcttcaggtctaccacgataactctttctaggtagtcccagcatattgaaggtagtaccattatgaactttctcatgccatggctaactatcggcctatcattgtagcattatatatatctatatgtgttggtgtccacttacaatttcatgcctctttgataatcttggtaattttctggtcatatctccacctgtgcaaaatttccaaatcctgatggtcaattggttaccatgcactatatatgaatcgatatggaatgatgcatgctttattgttgcagttaatttcaacagagtaaaacggaaggagcgatggattctctacgccttgcaagtgcaatatgaaatgctggggatacgacatttcagattcatgcttcaagtgatcaccatatgctgataagctgagagtatgctcaaatgctcagccagaccttctcttagaggtaattcaatcatggatactttctatttttctctgcaagttcacttgcaatatattagtaagaaaattatatatattgcaaagtataggagccattgtcatttttgttatatatggcttccatcacccccattgattactggccaagacatggtatatgttttttccatgtagattgagagggaaaatatattatgactcatgatgttttaaggtccgaattaacatttcaaattatactgtggcttctgactctgtagatcaaaattattgcagttgcattatgccattagatgatttcagaaattcctgaacattgcataattcactcaattgacttaacgttgcctctgctttagcttgtccatgccatgctttgtttggatagttccaaagatatatttgctattgatcagaatcaaaataaaactcacaaagtttagagcttgtgtgatatatgggagtcctctgtttatatctcttgagtgttcactctgatataatcatgcaaattggagggtatgtgtgtaagcgccagtttgattattgtatttacccaaaaataatgattgttgtatatttgcatattaggttgtgcaatgcatactctttgagatgttgcactgcaactgcacaaatcttgatctttttttgtgcctgtattttcaccaggtttcacttgatgaggaaatgagtttatagatgtgtagagaatctgaaaaagatatttgggaagagatggtaggtgcatttcagacaatggcaaggagccaaggaggtaatttctgttgtgcgttatgaattagaattagcgatctaatctgtactgcacgttttccatttcttgatgagaatgtgatcaaaacgactttattggaaataccaggttcagaggttgcttaacttgatgaacctattggaaagggtgacaaagatttcgacaggtttttacttgttttgagcttaatccatatgggaactgttacagtaaactgaaattcacatttgtaattcacatgtaaaccattgacatgacagtgaaaccactggccattttgctggtatagtgatattagggccatacatgaattatagttcagtctttttttataaactttggtgatgaagttcagatctcttcctgttactgtattgaagctgcaatcatttcaaaaatttcggaactcaattctttttctgatggtagcagtatacatgtcattttgctggttttttttctttttttcttttttgctttaaggggatcagggcaggacagaaagaacactatgaccatgtccccatggcccatgtccatgtacgcatcaagctcccaagtgataatctgattgcctgctctgatcctaggcgccggcggaatcaaccttgacccatcaatgatggtcatcccccattgacgatcacatggtccacagagatcatggtgtcttggacaccaccattatttctgacggtttaagctttgtctccacaattttttatctctgtttttgcttctgatggtttatacttcagagtttggaactgaatgctcatactctagatgaattggtcatgtacttgaaattttgcacatttggtactgaatctgcactcaaagtgggtttcttgatttggttaggtacattgtataagctaggttcgcattttgtacaattgattaaataatatggtttgtctatttgcgtagcttcacgctattctgtctgtaaatctacagagcaatatatttgattgaatttagcttagccttttcgtgcattgcacgtgcattgttactggccatccatggaattaaatgtgttgtagaaactggcaagtgtcaattcagagtgaccatttaggattccatggtgtgcatgctttcttgtggcatactggtcttaggagttcaaatagagttttagtgcatagattaaagtgagataaaagtttatgcctgaatatataatttggtcatcttaattcattttcaggaatgttaatatgtatttatgtttccttttttctcaaaaaataaaacccaccgcagagaatgtatggagcataaatatgttctttctaacagaagttttgagtacttaattttgtgcagctttcttaaactagctagccctagaatgatcctgtttgttgaattggctgtaaagatggagggtatctaggtaaaaccgtaaaagatagacaatttatcaaatgcatcgtctactctgattgtatattcgtaaactattgtcctttctagggagtaatttgggtaaattcagctgagggaataggaaaattctccttttccttcaaattattgtgttttacggcaatgagaaaataagatcaattgttattctcctgtaaggaattaatttgttcttctgtaagaaaagaatgctctgatagttattctctttactacttactgtatcacttctagctgacaatcatttaaatttagatcacaaatgtttgtttacggaagtagcagcagtgcaatgtatgaattttaggtggcaatttcgtaccttttgcgaatatttttttttacctttgctggtcagaaaattgtaattgaacacaaggtttttatagatatcactgaccaaattgtcatcttaggataacctataaaattttgttctccattcgtaattgtttgttagttatatattgtcaacatgtgccttgcacgtgaatgataactagtacttcgataatatatcacattttcaattaattttttacttttcaaacaaatacgagccattagacgtaaaattaaatagtgccaacagtcaatattaaaaggcaaccaagtttggatgaagaaagttattaaaagcaaaggttactgctaaatctccgtattggcaaaaaagggctgtgattcgtgacagactgatagataaagacaacaaacatgcagtgatatgtgcagagcatctggaataggagtgaaatttactccaccaagaatctttggagtttttcaagaacaagaatcaaacctagatgaccatgcaaattcatccagcaaactttttccttgcggttcatccaggtttaagttttatacttgatgtgaatgcttgtatttatggataacttttttagtggtaggcgatgtacccatttacaacgagatgtctgatgattttgtctatctcaagatatatcgaatcagctttttggaagtacttgtatatgtagggtttgcatgtgtattcatatgagtgagtatgtgcgtattaattatgaacacttgcatgtatgctgcggttcgaaaaaaaaacaatcacactctggaaaaccattaatttatttattttccgctgccgggagctcctcaccgtgacggcgtcatgacctgagcgagctcctcctttatctgtgtgcgcctgaccactcttcgagcacctgcgagcaaggcgcctaccagtcaaacactgttcaacttggcgcactgattgttcatgattgatgcagtgatccgggcagtgcgtattgacaggcaaagaacgtgctcccagataaagaattcatgtctaccaatatgatgcaaaatagtccagcagtcagtcgatgacatactatattgaattgcttagttttatactccatttcagttccgaggtgaagaagatgacaactccgatcagatctatcccagaacattgcttggtcgttttacttgcaagtgactcaacgaatgcatcgtgcggggcattttattaggctccgggttccggaattttcgataacgacgaggcaatcaaatgtatagtaatcccttcgtcccaagcaatttagaactggatgcaatatatattaatacaacgaatttagttatagccactgtctatatttattgtattgggatagatgtgtgtaaattcgttgtgttttatctagttctaggtttaggttattatgtattgcgacggagtactttgtaacataaagtcgcaacgcagagaggagttcatgattcggtagagaaacctgcaccgctgcacgcaccacggcaccaaccaatcaaccatggtcggctgcgtccacacctcgagtccccgactaccagccagcgtcaacgattttctaaactattcgcaagaagctggatcactttgcaaaacattgtatcgcaaaaaagggtctttatgggaacgtgatcctaaaaggggtctttatggaaaaatacggagtaaaaatacttaaaacagggatgtttctgcaaaagttccattatatgggccgtgtagcactgagaaaggatgggcttttcttgggcttaatgggctgcacatacttccaccgagaccgactccgtttcctcttcgcgtctccttcctcaccggcgaccatggccgccgccgctgccaccggcacaccgcgatggagctcctcctcttcttcgttcaatgcatttgcgtcaaggtcagtagcatcccctcccattcccttgaacccttgtcttctcctcgaccttcaagtcgcgtagcgccgtaaccagtaaccacccctcctctttgctccaatccaggaccccaccgccatcagagacctgcgctcttgtaatcctgtccctcttgggtctccaacccgctcacctatctccgccaccacgctccagtactgaggtataagttccaatccccccccaaacttgcaagaaaaaactgaatccggattgcttttgcttgcacattgcgatttggagagcgaacaagttatgccatatgttcaatttaaattggatgcatcattctatatggttacaaacttgctacgagttggcagatcgaatgcatgatggaagcttatgattagatctagaaacttgcacgcaccaaccacccttcaatagaaggatttaccctctttctagaaaagtggacaacattgcgtaaattccacatcacaacactataaacaaagggccttgttgtccagatacatatggataagtaagtgccagctctaaccccaaacatgtacacatttctaagcatcaatgcactaaacaaagggctttgatgtcaactttgaatgagccagaactgcccaaagaaaacctgcatcctgccaatacagcagcatatggaggtcatttggagcttaggagtacagaaaaacatcagaagcctgtgagcctgtgactaatgagatcactgggttgagtatacgtttcatggatagacagttgctcatctagctagtactgcttcaacctaaccaaactgcagtctgacatatgaaaaacgcatgttatttgaaaaccacaactgccgtctgacatatgaaaaacgcatgttatttgaagaccaggacgggcactcaaattgttgtacgtaatagaaacctgtatgattgggatgtgttaccaatgtctatacagctggcattctgagtaggatgtcactggtcacctaaactgtgcaaacatctgaagagcctgagatgagatctgggcatggatcaagctgaattggccacggttctcattcaatccccaaattgtgccacaatgacacctaggaagataaaatggtagacgcaaaagcacacaaaaatggaggtggaaaaagaactgaaagtgtcacacttctcacttggagagtctttgatctagtaatgcctaactcactaatccagagaggctgctctggagcagatcccaattgtatagagaggggtggcaacatggaagaaagaaagaaaaaggaaaacttctcaaaccctatacagttatctagtagaaacatgtaggagatctcaccactcaccatgcattgcaggagaaggatttcttcagcatgtgggcatcacgggaagtgatcaaaacaggatgaaatccccatacgcgcatcgcagatgcagccggcacattgatcatttgatctccaccggaagaacacacaaaagtttcttgtcatgtttccctgtcaaaagaaccaccttggttgcctcacattggaagaacggagtcctttcctctgccactcctgctgctgaagcatgatctcccggccggcgccaatctcttcatattcgcgccgtccggcaatgcccggccactgcggccgccgccgtccttgctgtgctccccgtgacaccgtcttgaggaccccgaagagcctgccaggaggccgctctccctggccaccatcagctcgtcttccaggctcgcctgcaggacatcggcaatggacatccggccttcacggtgcgtgtctgacaacgacgacggcgcccttgtgggcggcatcaaggcgccgtcttctctgatctcagctgtgccatttgcatcttccgacctccccggaccatccttcgcctcgtggttgcggccgccgttgccgacggcgacaccggtcaccacgttctgtggctcctcgcgcacatgctccgggttgtcaattgtcaggaccagctcgtggttgtctctcctatcctcccgtggaacgcgggcctccggctccggcgagaccatcccgacggtgacgaacgcgatgttgcagcggcagagcgggcagttggagtgggacttgagccaggtgtcgatgcacgggacgtggaaggcgtggctgcacttgggcagcagccggaggctctcgccttcgcggaactcgccgaggcagacggagcagtccgtgctgtccacgaagccgtcgccgcgcctgtacttgcacactgtgatcttgttgatcagcgtctcgtccatcccgtccgacagcgcgacgctccacggctcctggctcctggaattgtctccgccgtcggcgccgccgccgctgccgcggtgagcgctggagccaaggagtctgttccggagggagctgaaggtgccgcagtacttggatatgatggtgtagtagctgacgaggaggaaggcgctcgcgagcaccccgatgatggcgatgacgagcggcgagaaggttgggccggaggagtcgtcggagctggagccggtgatgtcgaaggccggcggcggtggcgggaagatgaagtagcaccactgcgggcagtacatgctgcagaggccctgggagcaatccctggttggctcatagggcacccatgtaggctgcgaaccgagatttggtgttgtagggggagaagaggccattgccgccatggatacacaagcacagcagcaacactagaggtctaaaggggagagtctaaagggatgaaggtgacaaagaagaaatcccaataaacaaagatgaacaaatctttactgctcaggccatacccagactgccatgttctagcaccggcagaggatcttcatgaatttccggtccaataattgtggcaagagatgagagaagcaagagaaggtaggtggctctgcttggacttcagtacaacccagttctttcgtggccctgggaaatgtgagatgagatgggaagagagcagcagccgtgaagaatcagagatcatgagatgagatgctgccacaccagctgctgctactaagagaaacgagagctaatctccaaagcagagagggagtgtgcttgcttggaaagcaaagcattttgggataggagagcctgaatgcttgatgaggaggagggaggtggcggtggttgggaattggggccttctttgcctttggtgccattgccaccactgctcctgctctctcgtccactaccccttttcttttcatttccctctgccggcgctgttatttcttttcctttgcctcgtttgtcccctttggaatataagaaaataaagtggatgtttggctgggataaagtaataaaaatatggagtgatgctggtacaaaaatgcagtgtgactgtgttccaaaatcccaagactaaacagtgaagggaataagaccattttggaaattgcttagatcgtcgaagaaactcagcaaccaagggtgtgtttagttctttgggtgtaaagtttttgaagtatacggacacacatttgaagtattaaatgtaaactaataacaaaataaattatagattccgcctgtaaactgtgacacgaatttattaagcctaattaattcgtcattagcaaatgtttactgtagcatcacattgtcaaatcatggcgtaattatgctcaaaagattcgtctcgcaatttacatacaaactgtgcaattgtttttttccccacgtttaatgccccatgcacgtgtccaaacatttgatgtgacgttttttgccaaattttttgggatctaaacaaggcccaagactattttagttccaaggtttttttagtccatggtgcactgacgatttcgttcaagttggttgtccactagtcaaaatgaaccgactaaagtgggaacccgagaatacggtctccgtcacgaaaaaaccaacttctgaatatgaacttagacggatacttgtccaaattcgtctttagaagttagttttttttttacggagatttacctcttcatatggcttgcacaataattattctacatcataagatgacatatagagtaatgctctacgtctagtttgaatgtcaatgtagtaaatattaaggggtcggtcattaaaaaaaagtaattttcttgttcctgtgaggtaaaatacatgcgacgaattatctaaaattccaaggtttagaattttccattacctgagagagtatatacggagtatatcttaacatttttgtctcccaatatcagtaggaaaacattaaatttagcttactcccaagagttattttcataaaggaaaggtatgaaagaatgcagtatgtttagtcctcctatcaacgactatatatgcacattagcgcatatctgagaatcttgagtcactctcacatcattcagctaaaatttctctggcttcaagtaagttaaaagacaacggcggccggtctaccaaaccggtcaccactcaccagcttctttctttacatttacttcttcttagacacttaatccttccttctgtcaactcaagtcattaatgtctttgcactggtacaactacacaatagcctggtcacctaatcacacttcctcttgagtaccatatacgaccatcatataccttgcttaattcagacaaagctcgcgactatagattttatttattttctgagtgcagttgataaaatggactgcattgctgtaggttgtattgcattagcactagaggcaactgtttttactcttggtaggaatcgaagtactttcagaataagagaaagaaaaaaaaagaaaaaaccttcgagattttatactggaaggcaggacaaagattcatgagcatatcaagttggcttgcgacgaaaaaataatttaatctgatggaccagatagtgaaggccgatctgttctaataggtgtgattccttttagttttggggcataaatacgtcgttgtcgtacaatggggtcggcattcggccatgtgtgacagcaacaaggtgtgtgcagttgacgatgggaaaaataagtggggaacatgcggtccaagggagctctgcagttccattcatttgaaaggtgaagaccacctaattgctgtcctctttgttggtaaaaatcggaggattaccaaatgactgtcggtgtttttatacgtactgggaataatatcttcagcaacaaacaatatgaatcaagtgaactgacaaagaaaacatatattcaactgcattggagaaatttaaaggggaacagagtaaattcatagcaggtggtttagggctttaggctaatatcatcaaaggtattatcatcatgtggaaacaacgagtgtacaactttgtagtaccacctaaaagttaatctgttggctgctcctccgattccctccatacccttttcttctttgatacctttctacaagccgaatttagttcgaagttgtcaagatttacagagatgccatgttctaatgcgggtgtgaaccatcatgagacaaaataacagaatagagcaactttaactgaactgaggctccgacggaacgaaagtagtatccaagattgatgagtgctatttcctttatattttcttatagacgaattgcgcaagtagaatcacatcacaactttcctatcccctttttgctatttctctatttcttttcatctggatacgtgtaagaaagcagattaatggaagaagatttgttggagaagaaagatgtagttagaattttggaccacaagaacatgaggcatggggtcatcctgtcttccttttctaaaagaatcagtaccactcttaccttgctaattacatagtaaagcaaaaaaaacacttgctgacatgtggatttactgaaagaaaacggcagcagagtagattaacctcatggaattcatcttggtagcaaagcttttctgctttgcattaatctggtccaccctggctcattacagtttgagggagcggccgctttacgttttgtaccagtgaacagtactgcagatttggcctgtttgcctggtcatctcgcttaagagcaaggataatagtgggctataagcaagctatatgcttatgtgaaagagagataaacaaaaggggggagtgttggctctcatgcaagagctaactgcacacaaactttaagaaatatgcattaaattcatggtgagagaaagagagaggatgaagaaaataaagataaccttatagccaatctactatacatgttagctttaacattgactaatggtaagtagtgagctctactattaaacttgctctaacaactgcaccactgaaagagcgttaatggttgcagtgaatgtactcctatttatggatacggtcatagggatactatttagggtttttcttctttagatgtctccaacaatactgtactacggcctatgggctatggccgtggatgaggaatacttctctgatcaattttttttgggtctgtatcaaaccaatgcttcagttccagtgttgctgtccataattcataccctgtccactgattattaagtactctcattagcacgaatctaaatcaagaatatatgaatgtaatgatgcaacagatgatttcgctcttcaatagcatctcaaagttgttgggaactaatttatggcttccaaagaaagaacaaaaacacaatctatggtacatctgatccaaagaaattaatacaactgaaccttgagtgatagactgttttctttcagaagacgatggtgtggaccgatctcaatggtttacaactttacataggatatgtcaatagcatcatggtaccgtaaggatgaaaaatagtgatcggatctacgacatgtggtatagttatatcaaagctttgctggaaaagcatggacgaggggtaactaaaattcagactttcctttgctttgatgagctgtaaaaggatggatccacttgctggacctcactttacatgataaaataaagctgggcactatgtaaagagagaaatgtggagctacatggcacatattatgccaatgcagaaactgctgggctcttctaaattatacactgtttgaaagcgaaatgagatcatgtaaatgatgttaccatgtagcagaagactggtggtgagtgtcagctaggaaatgcagatggtttgtcagaacatagacaatagtagcataaaaagatgtggcagtatgcatgaagcaaaggtccaataattacagtgaattggttgtaactagagaaatagacactgagactggattcgatgcaaacaaaggtaaagctgcaaaaagaagatcacacacacttgagttgggttatcctttcttgggcttatcggtgaagaaactgagttctgaatatcaggttggctacatcatttgcattctgcaagcacggcaatgttcctagcgcgaattacgtgtacttgggagtagtagttaacagtagttacatgggagcgttatttccacaaacactaactacgagaaagttattataccggcaaatggaggcataaatttgttgataagttgataacaaaggagcctatccttcagctgtctagtaaacattatcaggacacgtcaacaatacgctagtagcaaagctgagcaagttgtcaccccggcaaccataagcttaaagtcgttaggaacaaaagctaaaaataagtcctttaactatagagcataatcaagccacatggaagttgtgcttctggtgaagccgggcatattctgctctaaccgacaacgcgaaagaatacctctttggatggcaatatcaaaagttgctcgttgtaggacctcgtgtgtaaggaagataaacgcatgcacgcgtcgcgcagattttgttgttttattggtcaggtgatgctcgcgcttgcgccacatgtttggcaggcaagttcagcgaactgtcgaattctgaaacaatcagggcagctgcccgacggcatccatgatccatccatctgaactaataaatcaggcacacaccaccattggccggagacccggagtcccgtcctcatgccggcatcggaaatgaacgaggagaagcacaaaactcagatcgcaccgtgcgtgaagccttgggagttgggagtcagcggcgcacggcgctcggcgctccacccgcaggaggaggccgtgcgaaggaggtttgcttctcggtgcgcacggccacggagcgtaaaaagtggcgtccgtgccgccgcccgctcacgtgcactcgcgaccccgcgggcggctggcggctggctctgctcggcgtctttgcgccttgtcatactaggccgagtggaccgagtccacctccgagacgcgagcagcaaatggcccacggtttactcgggcccaaccgagaaatcctcggcaaaaatcctaggccgaaaggtgaggccccgtgaaatcaccaaacctgtcacctcaaatcgtcaatcgaaggaataagatcactgtaggttccttaatatgtcgttcagtctgatttttatcctcagtttgaaaaatgggatatgatacatccctcaacttataaaatcatataaacaagatccatcagcagtattgatcatagttttagctgatgtggctcctacatggtgacgcctatgtggctcctttgactaggtcttcgtcccacgtggcattgacgtggcgcttacgcgacaattcgattacgacacacgtgggacccacatgttagttacacaaaaaaatggtggggcctatatggcccaacatgtcatctccctactccctcttctctctatatgaggacggagcaaccatctcctcgcaggcctcacgggactccccgcctcctcctgccttgcccccgttgccggcgggggaaaggagcggcgcgcggcaggtcgttggtggagcggcggagggccacgatcggagctgaggggcagagcagtggcgggctgcaggtggctcttctcctcccactggccggtgccccgcaccgctccgcccggaaccgcgacttctctcccgcttggctctaccgttcctctcccgcctcgacgaggtggacgaccgcgacgatgtccttcttatccgctcgccccactccgcccgcggcccgtcgccactctgaccacccgctggccgctccgcccctctgctctgctcacgacccgccgccatgcgccgctcctttccccgccggcgataggggcgaggcagggagtccggcgaggccggcaaggaggtggctgatccgcccgcttccgcccctctgctccgggcgtatatagaggagaagagggagtagagagatgacatgtgggtcccacgtgtgttattattttttgtaaccgaattgtcacgtaagcgccacatcaatgccacgtgggatgcagacctagtcaaaggagctacataggcgccacatcaactaaaaccatggtcaacactgccgagggaatttgttcgcatgattttgtaagttgggaatgtgtcatatcggttttccgaactaaggacgaaaatcaaactagacgacaaattgagggacctagagtgaacttattcttcaatcgaatgacaggcccgtatttgggccgaaaggagaggcccggtgacacaactgcctggttgccctaccatagtctattcagtattccgtctgtctgcactctgcaggagttcatcaaaaaaaaaaaaaaaagagccgctaatgttccatcaaaaaggaaatctgttcacgcggtacttgagacatgaatgcatatggctaattggccggcatgcggcatcaattcgaagagacgctttgcagtttgaatggtgagcactgagcacggttgggaagtggatggtcaggaggatacgaagccctcttcaagacggaacagagtacggtgttaatgcagaaactctcaggtcagcctgctcttttaggtacttacggaattgtgctggttccagcatctcttagcgcaaacccgtgatggtggttgattgatttcgagcctaattctgttattctgtggggacctgattgttgtgtttgtctttgccgatatttgtagaagggaactttctgcaacttgcattttgcaatcctggggccttgtttggcttaatcccctgtgtagttgtcttttgtcgaaatcgatgatcaaacgaatcagagaaacaaaagaaaactctaagttagacttgctgggtaaagtctttcactgatttccttgaatgcctcttaaaatgcgagggtttggttccaacaagaagacctcttaggatgcgttctaaagagctcttttgctaggcttcttattcatttattaagagcacgcttaccaaactgctaaactatgaatatcgtgaataaagttttctttaaaaataaaaaaaatgtttttaaatttataatagttattaatactctgtacagattcatagtattaggatatgtcacattcatccaaaatctcttactccctccattccaaaatataaggcacaactacccttaacccaaagaccaagaaacaattattatcatctcctagtttaaatcaccctaataaatataatgcatgcatccaataaattctgatatatatatatatatatatatatatatatatatatatatatatatatatatatatatatatatatatatatatatatatatatatatatatatatattaaaaaaccgcacccaatccgtggtaaccgcggtaaccgtgaaaaaccgcacgaaaccgtgcagaatttattaaaaattcaaattatttttaaaatttatttgaatttaaggaggttaccgcggtttttctattaccgtaccccgcggtaaggccagtaaccacgataaccgcgtggttaccgacaataatataaaccctggaaaaatccttatctccttctcctatgcctagctccataatccttattaaattttaaaaattgctatgttattctagaaaaatatttgagctcccgttagctcaccgtacacatgcagattttctagctctgccgctgatgtcaccatcggattttaccaacttaggtcatcgttgagtggcagaagcagtgggtattcactgtattctcggaaatgcccataattttcatgaaagaacttaatatatgtaggtatatgtaggggtggtaatttctctattgggactggggccaaggaagaattctcatccgcggttgagcggggagagggcccgcaaaattccggcgatggcagcgcggattagaattaacccgttggtgatccggagagatcctggatgtgagttacttctataaaagtagcctattgcaataatgaagacccaaaaagcccatttaaaattgatacataaaaacttaacactctaattcccctcaaccataatcccttcactttcttcaaccaacccccatcgtcggggcctaacgaaattttatcatactattattcaatgtattgcaatatttttatggagtattaactccatccgggtgatgagggccctggtcacccgtcgggtcgggtggggacgggtgatgtttttcacccgacttcctttgcggggccggggtgagggtattccagcccaaccccgccccgccccgccctgccccgttgccacccctagatatatgacatgtatatatactggaacatgtctaatacctttttctcaacaaatccactccacccacactagttttagctcacaaaacttgcaatctagtagccaattgcctcaaatcttctaaacactagttgccaaacatcaagcacatgatgcatgtaattattgagtgaatacccagataatagatcctgcgtccccaggtgccattgtatccttaaggtcaccattggatctagttgcaccgaccttaatggtatcaggtctagtttgatgaaggacgaagggaagagtgagggaagcagtaaagcaccaccctccctagacattgctggtgcacactgagtcactgacttgtcgttgttgactctatactgttgtgcaacaggcaagcaacaagattgaaactaactggacggtatttggcagattgggcgatcagcggctatgggcaaagagtttaaggaggggagcatgatccctcatctacatcgtgctttgatggtcgacatgctttttgaactccacatgtgtctccgttgctaagaaagaagaggacactactagaaaaatgtttttttcaggctgccaaaaatgattttttccggcgggggaacgatccatttgtatgccgatgattttcgcagggcgacccagtcacccgcctgtgaaaatcatctcgacgaacaaaaaaaatatcgccaccaccccacccgcgcccctaccaatctccggctgatctagggttaggggaactgccgccgccgccgccgccgccctcccccagcctcactccggccggatctgggagggaggggaactgtcgccaccgccaccaccctcccccggcctccctccggccggatctgggagggaggggaggggaaccgcgccgaccccgccgcctcgctgttgccgtcgtcgacctcgcgcctcgccgtcgccgacccgccgcctccacgcgtttctaccgcccctgttgctggtcgctgagggagctgagggagaggagaggagagctgagaggagaggtgaggtgagacttagaaaaaatcgcggtgccatgtcgtgtctatttatatccatgccaatttccgcaggcggatcacataagaggtccgcttgcaaaagtaaagggtatttttgcatgcttacttttgcaggcgggcgcctgcgaaaaccggacaacgaatttcaaccaggtttgcattttttgtaggcggccatttcgctccgagggtaatgtctgcctgggaaaaaataccccatgtctgcaaaaatgttttttctagtagagggagacattagattttaaaccactagatgataaatttagggattaaaaatgcacttttagactttatcaacctagctgatagccgattgtaattttgacatcaaccagcatattttattctttgtgtttttcttttgaacaatataattaatcaaacaggaactaactatatatccctccaggcagagggtaatatgtatgcattatcgtcacaagacaaaattaagctataaccactaacaagatagggtcatgacctatggcgtactattattcatatctatctacatgatgcatcggctgcgatgatctcatcaattgaacccacccagttatacctcagccaaagggataaaatcgctccaaaaaacttggcaaggaaagccataagccccctgcgttcgcgaaagccataagcccccacccccaacttcttgcaacggaacatgcaagtacgatgcatctctgtcgctttcgttatctcgagcaaacgagacatacacgccgcgagtaatccaaatccaggatgggcaatggcatcgcgcgcgatgcaattgcaatgcacagtcacgattcacttcacccaaaagtcacgcgagaaacctaacccctacgcaaggtgaaagccggcgaatccacggcgactcgcactggccgtccgatgctgaaacggcccaccactcggcgctacgcatcacggtccatccactccagtcccgcagccctggtggcccacagggtcgggcccacgtgacggcgaggtcggtctaatccaacaggtccatgtcacggcggtgactaatcgatcaaagttagggagcaaatgacacaagggagaggattaaaaaactccaatagagagaaaagaaagtcatgggtggcatgggggcgttggatggtgggtggcaacgtcagggtggccatggcacacgctggtggaggcgttttccgtcacaatattccagcctccgatcgacgacagggcacactcgcgcgcacgaaatgctgtcgattgccgaatcgcaccggacggactggttgagcacttgtttgatctgccgggttggacaggaagcgagcagtccccccttgcaagttgcaacgacatatcaagatatcactgcatcgaccgagagcttcggtgagaaaaaaatcgcagcgaggtgcctagtgggaactcagctttgccgcgcgataaatgcgcgacgtcgattgggggggaggaacggcttcttctggacggacgggaacggctgcaccggtgcaaggaaaaaaagcagagttgggcggaggtagccgtcgccgtcgagggcggccgctttcggggacaaatggcgggtcaatcaagttaggcggcgtcgcacggcacggcacggctcagcatcggcgtccacgacggttggccgagggccgagtcgtgccaccgtatatgcccagtgactcaccgctccagcctccagaagataccgaccccctccgcgcggcatctttcacgcgcgcccgagaagtccaaacacgtgccgccctcccgtcctcccgggcgcccgtgtgaccccctcgtgcaccggcatttcaccgagcaaccacctcaccgtatcagcagcggccacggcgagcagcctcttcatgccgcgtctgtgctggggtacacctgcagaatgtcaaagacacaccgctctgcgagtgaattagtgatcgatgagtcactcgaccgaatgcagcattggaagcgatccaaccaaaaacccgtggcgattccggggtaatttggagcagcaactcttttttttttattacatgggtaatataatgcacatatgaatatcccactgtgtgactgtctcctaccccaccacagctctgtacatctacaatatggaggttactactactgctactatatttttacacggttgcaaaacttagttgccgttaccgagtcgtaagcacccagcagtgcttggacttgactgggtactaactaggagtaactgaactgtaactaaaaaccgaagctgaaaagtaacaaacaagctataatatgtatgtgacgtggcttactgctcttgcccttctccggcattacgccggccggcctccgggaagggaagcgccgggctcgccgccattccggggcacacggttattgtgtttggctatgtcatgtgtacagtacactatgttgatcaggcgcggacgcgtcgagactccctagaactcgacgatgaggctgccgaagggggaccggtgcgggacgcccttgcggcgcttgttgccggtgcggtagctggcggaggtcggcggcggggtcaacggcgtgaagctctgcacgacgctgctcttgtcgctgctgccgccgctggtgctcgtgcacgagtcctcggactcgtaccgcgcgtccttgagcgccgccctcttcttcttcttcttgccaccgtcgccgccgccgccgccgccgccgcacccgccgtgcttcttccttgggcggtatccaccggacgtacccacaatctgcagagaaaagaaaataaagacgccattgttggtgtctacgagcatgcgtcgcgccagaattgatggcgttggttggtgcgtgcgtaccttgcatccgagggagcagaagcggaaggagtcgaggaggctgcgctcgcagacctcgcaggtgttggtgacgcccttgccgggcctcggctgggggcgctcgttgaggaacaccacgcgggcgctgttgatgatgtacgtctgcacgccggtgatgtccagcaccttctgtatctccgacacccggatcacgtcgtggtacgacgacctccgtatctgctccatccacgacatggacggacaggcaacgcgtgagtctccacgatatagatcgatcgatcaagaagcacacgcattggattaacagactgacctggatggcgtggtggtcgcggtggtgggagaggcagagggagcagagcgcgccgttcatgcagtcgaggcagtacatgttgcactcgctcttgtgcgcgtcggcgtggatcctgcattgcacgaagaagctcgtcgacagcagcggcttcagccacggcggccaccgctggttctccacctcttcctcctcatacccccttcctccctgcacccccacattcaatccatcacaccccaatcaataaccaagaaacagagcaagagcaatcaatcagtcatcggcagctacttaccatgtcgcctctgttcttcagcgagaaaggggacgcatggtctatcgccattcccagtgcgaagcaatcgagagagagagaagaatgtggatggaagagacgagagaaaagagaggaagaggctcgaagcgaaagaaagcacttctgaatgtatgtagtgtgaagtcttttgtagaccaaggggggcaaaagacgaaaagtatctgcaaacaccggggttaagtaaactaatcggaggaagactcggggagagtatttgtgctcgttcttactcccaccgtctcaaaataagtacagttttacacatttgaccgttcgtcttatttgaaaattttgtatgattagtatttttattgctattagatgataaaacatagtactttatgtgtgactaaatatttttaaatttttcgcaaatttttcaaataagacggatggtctaatgttaggcatggatatccacggctgtacttattttgggacggaggtagtatcaactactcgtacatggcggatccgggccgtctcataagtcacaacccggcaagcacatatgaccgatcgaatggcagagcgtgtttccaaacagtggaatcctagcacagttcgaattgtctcctaccgcaatgtccctttcgcttgaaatttactaatcagagtgttgcattcacttgtgaaccttatcatcaacagcattatgatttactgatttctttttcgttacagtaacgattccgattgcaacttgcgacggggcgagacccaaaatccaccgtaaattgtcgtagagtaaagcagtgctatcagtttggatattttcttttcctacattttggaattatcacttgctagtgaatggatgctttctctaggagattctattgcacttgcgcatatgtttcagcttcccacatgaatggtggggaaaaaacattaggcgcacgtttctacccgaaaagtgaaaaggggaaaagttaccactaactacgccattaccaccacaaatactaatgtgcctgccacctttggcatcccacattagtcttccccaagtggatcaagagggggatcagatgcaaccttagccgtgcgtgcgtacgctgccatacactacgatatctttttggacggagcagagcacatcggcgagaagcctcgacggcctactggaatcaggatgccttttttctggtggcctactgcataatttcatttgccgttttgtaaagccatttcattttgccgttttgaaacctacaaaccggtagaaccatggcatcaataattcggcaggtgatgctacagattttctggcaatcgtagggcgttcggtttgtggtttggtcacccactcctgtaacgccatctgaaccattgtgcgtgctactgcatttcggcaattcctggctggtacttggaactgtgcacacagtcacacaccgaattgtactatatatcgattagattagcatctgagcacacgttttgtggactgttcgtccgaattttttttccaaccccagttcacctccattttcatgtgggaagaatcgtgtgtgggcccatgggatattgatgtgtgagatcatgtgaataatcagtaaccaggttaaagataaagtcagaaatacggcatattgattagtcttgcagcggttatacgtcgcatcgtctccttggagccagtcgtaatctcttagcagataatgacgaacaaattaagatttacatgttagtaagacgattacccgcagtatataatattagctgagtgggtccccaagtcgtagaaacgaacaagcaagcgttgacatgaatttttgtttcagcaatcaggtttcccatttgagttcagccagtctgctgcgatagacacagcggcgtagtacgttgcttcaacagttgaaccatcacgccgcccatgagtccatgacacatggccgtcaggttttctgttaacgattttctgcactcctggattcttggccgtccccttgattcacgggttcaagtaagcatttcgtcgagagatcgcgcataatctgcccaatgcgccaataattcagacgcagattttgacctaattatgttaccttgtacagttggccgaacttattaagacaaataaaatgagcactcctgtttctgaactgttggcagtcacctcaatccactgaatcttagtatagtgatgagcttatagaccacacacccctgatctgctttcagtgggttggcatattggcatctccagttcgggagacacctcaaaagcgagaggccagctctggcacaaaggccgaatttttcaaggcgtgccgcgtgcattgcatctcatctgctcttgatacagccattgccgcacagcgcttgtggctccagttccggagaggtgtttggataacctgactaaattttagccctatcacatcaaacactaatttagattattaaacatagactaattatacagatagaggttaatttgcgaggcgaatctattaaacctaattagtccttgatttgacaatatagtgttacggtaaatatgtactaatcatagattaattaggtttaatagatttgtctctcgaactagcctctatctatgtaattagtattgtaagtattctatatttaatattctaaattagtgacaaaagtcgggtatccaaacaccccccatattcctccggcgctaagtcattccgcaatcatctagagacaagaaaggtcttcgtcctctctctgcgtccaacccgaaggatccacctaaaaagacgagctttcatggctctaccgaattctggcacatggctgcatcagattacgttactactcctattacggacaccccgtgagagaggcaccgtgtcattgcgaagtgaaatgctgctccatttccatccccatttcgttcactagctgatcagaggctcttaacatttcggtatgtggctgtatgtgcagtgcagattctatgatatggtcatcagtttcagtactgtactgtatcgtacaggcaagggcaatcactcgatataaataggcttggaattttcaggcgttgcgtgctgctgcttcccatggcggctgccgagcaacgcggaaacggtcgcgcgaggacgacaaaaccgacgctttgttttaagcctgaaaatcattgggtggtgcaagtttatcacaaatattttagtacagagtcgtaatcctagtgccggccgcattgcgttagcgtttcggcctggaggaattaaaaacaacctgggaagtggttttttctatgacatgcgcaccccgctgctgtggatggctgaggcttaaacaggcgaaccgaggtgacgggattcatgattgattgctccagaaattggtattctaccatggagttggcacctggttgacacctggattaggttggtcctgatctttggagtatctattcgttttttccctttttgggttttttaaatttattgtttttccttcctttacaggttgtaagactctttttcaatgttttgtagtgcacatttctttaatggaaatggagggtgtttgccctttgataaaaaaaaattgctgctttcttcgtggttagctgacacaatcacacaacggcgggtttgctttggttgctctcggctgcaggtaggaagaaatgaagcggatgtggtatactgatattctgagctctgccgtttgtttcagaattcatgcaacctgctgtaaacttgtgtgccgggggccttgcaggcttgcaaccacggtagatggaatgatgagtttggtcaatatttttttttcttttacaaagataacatgtcagtgatcaggtgtaaccgtgtaacacgcctaatctaaaaaagaatagagacgatacacctgatcgtgagcgatgttcacccttacggccttaccttcattaatgcctaaaaagattccgaaataagtcattcttcatgccatcggtaggctacaggttccttttatagtcgactagattcattgcagaaccaacaaacaaatctatacgacgagattgctacctggcggtcaatcgccaggggcgatcacgatcagattcggatcccctccctccacatgtttttatttttttttttcaccacattactttcctattttaataaatttatgcacctaaagtttgtacacctcaaatttacacatctaaagtttataaattaaaagtttatatatccgattcaaatttggattcaaatattttttatatatagtatttctatacatctaaagtttatagacccaaagtttataagtcaaaagtttatataccctattcaaatttgaatttgaaatgtatccgattcaaatttgaatttgaattcaaatattttttatatatagtatttctatacatctaaagtttatacacctaaagttcatagacccaaagtttataagtcaaaagtttacatacccgattcaaatttgaatttgaattatatctgattcaaatttgaatttgaattcaaatatttttttatatatagtatttctatacatttaaagtttatacacctaaagtttatagacacaaagtttataagtcaaaagtttacatgcccgattcaaatttgaatttgaattcaaatattagtttatagacccaaagtttataagttaaaagtttacatacccgtttcagttttgaatttgaattcaaatatttattgtgtaataagaagagaagaggaggagggagcgacggagcgtatagggaaggggcgggcgggtgatcacccacctattagccttaccctgtcttatatgcccatgaggcatgcccaacgcaggccataccctcggttgctatgtgggccaaagccacaaaaacgatctcatccccccaatggaagcaataccttcagatatacccttttcaaattaaagctgcacaatagattaattgcacaggtgcttcatgctacacaacgcggtgccacagcctaaacctagcctcagagcggcgcctcgcgtgagggtgcgcggagcgatcagagggttcgaacctcctcgcaggcgcgtggtcctcgccactttttggccccgcgtctgacatgtgcgcctaggggtacgctccacgtactcgcgttgggcatgccctgagttctcaaagcctcttttttcagtgttcacctctcgctaaacgctagtcggacggccacctactgactagcgactaggctgattaggtggcgactagacggattaggcgaattagacattttatctatctctttcacacaaaaatactgattctagacatttggtactcggtaaatataggcatttagacaaatatcataaatcatagttaagttcagaaatcatcaagtccatacaacgaattgacactgcacacgaagcattgggtttagtacaaatatatagggatagcgaacacatcagtatagccactgtacatgcacatcacaattcataaaccataactttatagatctgaggggctggagctaagagagaggaagaaaaaattatctagaactggaagaacagaggaggtaaggtggtggaggggagcctgatcccctgatggcctgatctagggttggcgtaggctgcttgagtggtgccgtgcttgactgcttcaatcggtgtgtttgtcaccttccattgatggcaaggatgaaggatgagatggagagcaggagcagcaaaggagggggaagaacgtggagcagcagaggaggagagggaataacgtagcggcgcggtggaaaatcgatgggcgcagcgacggagccgtctctcgtggcggtgtgaaaaaggggtaggcagggattgcgctctctctctaggctctcaaataaggcaacctaaatccccttttataccgagtcggtcccgcgtggcgcttctaaattttatcacgcccaaattttgatttctttcgcctagtcactgcctagacgcactgtcccgttgtctaattgcgcctaggcacagtcctgtccaggccgtccaggccgcctaggactgactagtaccgtctagacggtaaatcgactaattcactgcctagggtgtaaactggacaaattatcgtcgactagcgattaatcaccgtctagacatgctaggcggtcgtttaggcgaacattgcttttttcccatgtttcgccagccctggccatacatatctttttgccggttttttgctgggaataccgcgcacgtttatcattttgctggagtttaaaaaaaaaaacaggcgtcttctctaggcctcttcgacaaagccaaaagcaaatatcgcctcggtactcacacgtcctcaatccggactccacatgcgctcctgcatgctcttccttcgtgaagaaaaacaatcaattagatttctacgagtatcatctatctatctatctatctattatattattaaaacagccttaaaagaagacatcatgttcgctgtagggctataaattctcacattaatcagagaaaaagaaaagaagagtccaattagaaattcaattcaaaaatatctgaaattcggaattaaaataaagcaatattgaaagaagtgtccatataaaaacccaatacgagattaatcaaaattcaaaataaaaataaaataaaatacgaaattaggaaataaaacgagtctaaataggaatataatttaaaaataactgaaattagaaattaaaaataaggaatattgataaaagagtccatataataacccaatacgagattagttaatattcgaaataaaaataaaaataaaatctgaaaatagcaaaaataaaaggagagttcaagtaggaatacaatttaaaatcaactaaaattcagaattaaaaaaagcaatatttaaagaagaatccatataagaacccaatacgagattaattaaaattcagaataaaaaataaaataatatccaaaattagaaaaattaaaagagagtttaagtaggaatacaattttgaaacaactgaaattcaaaaatgaaaaataaaaatattaaaataacactatacggtattaaatattttttaaaaaaaattctgaaattagaaaaagaaaaagaaaaaagatttaaaatagaatacaatttataaataactaaaattggtgataaaaataaagattattaaaaaagagaccatctaaaacacacggtgagataaattaaataacaagcctataaaagagtagagtggtggcggttgattcgacatataaaaactgttagtaatacaccaaatagaatctttagaaatcccgtcaaatgctgccaatatactcctctatgacccatctgccgcttaatctttattgtcattagcattttaataattgaacaaaactatcgttggaattcatattttactttcaagatgtcccaccaaccatcggtaggccgtgaagcaaacgggtaaggcggttgccgggacttttagaaagtaaaaaaaataaaccccatcgataatcatattcgatttttaaaatctcaatgataataaaaaggagaagcagtaggcggggtgtataggagtatagttgcagagccgccgacggttggcgggatttctagaaaataaaaaagaattccaacgatagttatgttcgatttttcgaatcccaatgataataaagagtaggcgtcggatgggtcgtagaggagtatagtggcatcgtttgacgtgacttctaaaaattataaaaaataaaacccaacaagacaataaattttaaaactacagggtccaatttttaaaggtacgaaacttctaaaaagtaaaaaaatacaatgataatcatgtttgattttaaaatcttaatgacaataaaaaaaggagacagcgggcgagccataaagagtacaatggcaaaaccgctgacggtttggcgggacttataaaaagtaaaaaaaatgaactcgaacgataattatgttcgatttgtaaaatcccaatgacaataaagagaaaagacatttgacgggccgtagaggagtataatggtagtgtttgacaagacttccagaaattataaaaacgaaacccaacgagataataaactcaaaaaacaaatccaatttttaaaggtttcaatgaacgaaacccaatgagataataaactcaaaaaacagatccaatttttaaaggtttcaaggagaatgaatagaaatagtggtagaccgagcaagcaaataaagaagatatgacagaagtaaggggtagcagctggtgtgacttttaaaaactatatagttagaaatacggggatgatacggggataactatttaacaaatttaaagtaaaatcatactaaaaaaatatatgattttgtttaggtgctagccgtgcaagtgagcgggccacccagctagttcgatttatatgaatgaggtatagaaaaacctcttaaaaagtcctatgaattatgtgtacatactcatattccttcacttttattattcctatgagttaaaattctgatgccttcctccttggtgtgcagccgctggcatacgttggccatcttgatcttttgagtcctaaagcttcaggtgccaaatcttatcaaatctaggcaacgaccaacgatatcaacctccttcgcgtgtgttggcaagcttccctttgtgactccatcggttctcagtgatgatctgttggctattgccatctgcccatctattagttccgttgtgtaaggcggatggtaataacgggggagatagggatgcccacgatattatttttctagagtacccctccattgacaattgatcatcacattatgtttgtttagtaatatactacggaaaaaataaattgagagaccacaacgccgtaatctcggttggatggcccacgtatgcacgctgaccgcacatgccaaatgacaaactaatcaaccaataattattgtgcattcaaatcatatgcaagcatgtaacaagtaatctctcatcactaaattcttgattgcacttttttcagagaaggttattttttaatcggctctacatccaaccaatatatggagccatttgaattgagaaattagccccgcaaataatctaatctaaaatttactcctataaagatttaaacttagaatattggatactactcaggtcactacaattactaaactatgcacatgagaaaataggaatttcgcttgctcctcgtgttatgtgacgatcaattctgtttttttattttgtgtcagggttacggataaggtataccctctacccttggatatatgttgtatgttgatacggtatacctgcgcgtatacggatgtttcctgtatacattaaggaaatccatcacgtaatagaaacggagtccacggatggaaggagtcctactcggacagaactaggtcgttactatattgtgtggggtccgatatctgcgagttctacttggagatcgactaacccgcggtataaaagggacccccggggaggacctaagacatcgaatctcatcaccaacacaaccaccacagcctacgaagtcgaagccggcaggagctaggggtggaaacaagccgagccgagcctggcttggctcgactcatgaaagcttggtgcaagggaagcttggcttggcttggctcgctacaaacaatgagctaaaaggctctgctcggctcgtttatgggctcgagctagctcgagctggctcgcgagcctggcatcaagtaaatttcaagcaggtctaagagaaatgaagcaacattttaccacatagaatgtgtaataaagtgatatttttctttaatatgtcatcacaacacataaatagataatatgacaatcaaaattatcatttttaacaaataaatagttagaaaaggtgtaaaacttttgcatatgacactattgtactgagccaagcgagctcacgagcggctcgtgagccggctcgggcttggctcgttcggaaacgagctaggaaggaggcttgggcttggctcgtttggctttcaagccgagccgagctatgtgagcccgagccaagcctgagccgagctcacgagcccaagctttttgtccacctctagcaggagccaagtcgccgggtgatctagtcgaaccaactcgactacggtctcgtcggtatcatcgagttccatattccctttgtaatctgtgacttccaccatataatcctatatcaactggattagggctattacctatcaagggacctgaaccagtataatcattgtcttttatttgcttgatgtcgtactacgtagatcctcgtaccagcgtaccccaataccctctatatccggtttacgggtaccccatatcgacattttgataataggatgattgattgtgtctggagggaatatgtttttctaatttcctagctactccctccgtcccataatataagggattttgagtgtttgtctgcactatttgaccactcgtcttattaaaaaatttgtgcaaatataaaaaaatgaaattttgtgcttaaagtactttagatgataaagtaagtcaaaaaaaaataaataataattccaaaattttttaaataagatgagtgcaagcaaaaacttaaaatcccttatattatgggacggagggagtaattcatatttttttctcgggaagtgctcgtcaagagtcaagacctcactctttgctccaggtgtttctagcgagatgtggatttgacggtgattcttggaaggctattgttgacccatcttttttacagagcatgactatatctaacggtacatattgaatttgtgttgcatcggacggtcattattcaacatatgacgtggcttattatatgatcaaagcaggattcacttttcacttggatagatagatagataccctgtgtatatttactacttaaaaaaatctataatgatgatggtgaagccgaccctgatagacctgcacaatcacaatcgttccggaatcggagttcacagtccccgggctatcctcctttataagctgctctctgccttctcaaactagcgagtggtattaaacttgctacagtaccgcgaaggtactgtagcgagccgctgctctgcctgctgcgctgctactactactctgctgctgttgttgtgggctgctgttgggctgggctagccggcctgctgcttgctgttgtgggctgctagctagcttgctccttttctttctctccttttctttttcctctaatcattgcggggcgttacaaccgcaccgccccgctcacctctcactcagagcaagtttaatagtatagccaagtaccaactccaatttatctgtagccaatctaatagctcatttatacaatagttacatataagtatatactacaccattaatatatggtcccacctctcatacacacacaacgtattggattccacgctgcagctggctacaaatctgcagcctgttttccttctatctcttttcttctctcttccgcatgtgtttacaactgacttatagcctgctcttgtactcgctctcaccacgcgtccccctccccaaattccgagctccccaccacccgcattttgcagtggcttgcaatgcatgtcgccaactccccttctccgtgcccatgcatcatcggatcgagcgtcaccgtcgtcggatcaaggaagccctctcaacgccatcgttgtcagatcgaggggaggacgtctcctccgctcaacccctgatctccgcctcgtcgtgcgtctccgctccacgcccgatctcctcctcgccgttattgtactccgtcaccagaccacctcagcccacgcgtcgcaacctcctccatcaatgatgcgctgctatccactctgcctcaagcgccaccggcaccccacatcgccaccgttctccgccgccggaccactgtcgcctcgatctgctccgcctatgcgtcgctgcctcctctatccaccctcgccgccccgaccttcaaattcgtcagccgccaccaccgacaccatccatcccctcaccatcaccggctgccgattccactaaccgccaccccctcgcgctgcccaactccgttgacgatgatgcgctactgtccactctgcctcaagtgccaccgacgccccacgtcgccaccattctccgcctccggaccactgtcgcctcgatttgctccgcctatgcgtcgctgcctcctccatccacccttgccgccccgaccttcagattcgccagccactgccaccgacgtcatccctcctcctcaccatcgtcaggcgccaccccgccgccctgactactccggacaggtatcttcgtgcccatcctcttgtactgctcgatgaaatgccaatagggtattatttgttcacgtaacattacatgatatgtttttttttagttttacttgtcaaaactgaaaatgagatctctagattgagcaggaagacgatagcaaacaagaaaatatatggatttgttggttggttggttctgctatttctttttccatatttaagtgcagtatagcacaggataacactgcacttaaaatattttttttcatattatggttcaagtgctgatattgtggattgccataatactatcatcttccaagtgcaaattatcatggagatttctgggttgatgaggcgctgtcgttatggaattttgattttatgttcgtccatgattaccaggattgggaaggatctaatatgtggtttaggaaagggagtgcttcaacctggaagcatctcctgctcattatgctcttaggtgttttatttctgatgccgctactattgatacaacatggaaagtcacatattgttttaaaatatttattgtgcttaaaatactatactgtataatgtctgaaatttttactcatgcgttagatgtttcactttcacatgtgcacttctgttgaatgtgttgttaagttcacctatgaaccatttcgctaagtggtttacactacatttctttcacaggtggtgatcatagcagatagcaatccaattcctaccgccgtgtaggtgtcatcttagtaaaaaaaccgaaccagaccggcggttgaaccggaaaaaagccagaaccagcaccctcatcggttcggtttaactcaaagaccacacatgcagttgaaccggtacaaaccggatgaacgaaaaccggtgacgcgggctattttgaaccggcggttcaagaggcagatgggctggccttgtaaggcccacttggattgttgtggcccaattgcaatttaatgcctaaaaggagaaaatggtgcggtgcatagggatcgatccctggccgatggcatgaaagcacatcaacctcaccaccaaggcaactatttaagacatatagtctttccggttcagcaatcgaactcgtcgacacggaggtccagcactttatttttctactatgggtgtcatacactttattttttctagttataagaagacaaaaaaaaaagctaggtatgtttcttatgagcctgtatatgccactttactaaaagttttccatcctcaaatttttgaggaactcggaactaccgttaaacaaacgtgacctgttccaaaatatcataacttctccatcaactttctcttcccaaacaattacaaaccttcactattcacttttcccacctacctccactactcatccaattacaaccctccaccacttacttctacctactttcttaataatcatattcaactctaaaacttcttatattttattttaggacggagggagtaaatgttaattggaaaagcgtgcgtgtactcctagaatgtgaaggttcgattagagcagcactgctgattttgttgaatggcaacgtgaaaatattgtgtttcaaattatgattaatttcactatttcctggttgtagttccttcctttagaacaatcttccgcgctccgagaactaaaagaggtaaatataaatccccagacagaagaaaccaaaagtgatataaaattgttcattttatattaaggtttttgttacaacaaaattgcacgcaatgattattaacataatttcacgtggtgtaatttaaaattgatatatgtttttgtccgttgcaacgcaccgacacctaactagtgtaacaaaacacccacgcgaaatggcatgtgtttgggacgattgttgtatagggtaacagggacctgtgtttggaactattgctgtacagggacctgaactctggagaccacggtggcaacagaaaatcgtcttgtaaaatacggcatcttcagtttcgtcgatccgtgcttgaagctcataggcatggattagcagcggcagagaatctcgtcgataaattttcccgttcgctatccagggtataccagcccaatatgctagattgtccctggcctgtggcctctttgtctgcaacttgatcaaggatgatcagccaccgttaggaatgtcgagaggataacaattaaaggattgtctaatcgctacctaattatggaatcccccggtagttaaccggctaattaaaccacctagtaacacgcagcaacgtgacgcggagattaggggattgattaactatcgggaatgatggggagccggccagccggggattcgactagtcgatccccgtcgccgtcgcgtggatatttgacgccgaccggccgcggccgggacgcctggacgctgcgccgtctaggcggatttgaatatagcgctgtcgccatgtgccgcgcggtgcaccgggcacctaccctcgtcgaggattaccgcggggaccgtgcctacgccgccgctctctacaatagcagatgataccgcggcgtcagcccatgggctgacacctgcgcgctactgtgcctacccctccaccggtggttgcctgtgtttggttggctgattaattagttggtagttgctggtgctgtgcctacctgcaacatgttaaggatttgcatgcttgtctctttgaactggcagaattcctttccaaggatagaatgagtgtcgttgctgatgatgtgaattgatcgacctagtggctcatgtgctgtcaacaagggaatccgttttcctacttaaattgtcgtgactcctgagtcgtgacaaaggatgagtggcttaattggggacgcattcttgttctttgtgaagtctgaatctgcgcttctggcacgacggattgcagggaagattttgtggcttccgctctgccgacgttttggactgaaccctccgcatcaacgacagtgtacactctctttggtggtgtaccggtgtactgtgttgcgggagaagatttgggattattccctttcggagcaaactggatagttttggaggcaagatccagcactgaagagcaagtcgatatataggccattatctgagaacgaaagatgtttgcttctactccttgcgaacttggcaatacggtgaaaaatatatactacaggtgtcgaagcaggcggtgcattttttaccttcctatgggggagaaaaacaatgcgcttcctcccccgggtctgtaattaaataacatggcaaaattttgtccgtgcccgttcccgttgccgtcgatagccaaattgctctcgtcgttttccatgttccatgtacgatgcggaacgatggaatatctggtcgaaacgcaaccgcgcaccgtacgtgtacacgcgctcgtcgcaaacgtgcacggtttgcacgagtggccgacgtctagcgaaagccccagacgcagagccaacgacgcgcgcacgctacaccacaccgtggaggttgtcagccacacgtgcaagtacaaccacaaccgagggccaggcggtagtggacaccgcgccacgcccgctagtcaatccacgcgagtagtacgcgactagcaacggcgtgtacgtccgtgtacgacggacacgatgcctcgtcgtcccgtacggctgcaaccaggcaaaaaccggcgcggtgaggccaggtccgcgcgtgcgcgcctcgcaaagccgcgagtcgtccgtccaccagtccaccacacgggcgggcatggagaatggagaaagagaaaaaagaacaaacagcctcggtcccgtcacaaaagaccgacatgcggggcccatgtaactgaccccgacacgcctcattcccaccccgcacgtgcgccggcagccttatctctcagcgcggtggccaggattctctgcgtccagcgacactgtgaatggatttgcatattagtagtacactttataaatcttcgaattcatcatatataattttcataaatcttcgaattcatagtattactccaagcatgtcatactccctccgtcccataatataaggaattttgtgtttttgcttacaatgtttgatcactcgtcttatttaattttttttaaaattattatttattttatttgtgacttactttattatccacagtattttaagcacaacttttcgttttttatatttgcaaaaaaaattaaataagacaagtggtcaaacgttggaagcaaaaactcaaaatctcttagagcaaagataataatatagccaacctgttggctataaggttctttgtagccttctcttagcctactcatataatagttagctctttacgattaatacagggcccacttgtctttctcacagagtttattagttcttatgttcaagccggctgtaagtttatagcctgcttgtcctctctctcctctcttttctcctccatctcagcatttagccggcttatagcctactattatacttgctcttatatcgtgagacggagggagtcaattcggatcctctactgtagaggagaaatttcagaggtagctacagtgcccggcattaggagtactgtgaagcgtccgatagaagatggatggatcagatgagatgctacagtaaatctgctacagcactaaccagaggtgctacagtacattcatcccctgtagctacagtaaatcgtgactgtggtgtgcattagaacactgttcccctcacatattagtgtagctatagtgaccctctacattactgcagaggatccgaatccggagggagtacctcaaagtagggttttttatgggagtacattgttttgtacgagtgcggtgttcgcagaagatctttttcatattcctcagctgctagccgccagctctacggatggcacactcgtaaataactcgggagtacgtgccggtttggtgcgctcgcgaaaccacaagccgttagtagtaagctccggtggtggcgccttcattatggcctccgtctcgctctattccatttccattccgttctacagcgacgttgtgagtaacgcctcctctctctctctgagaagcgcggagcggagttaagagagggagagacgcagcaaccaacagcacgcgcggggctgagggggatgaaggccgagaaggcagcggtcgccgtcggcggcggcggcggcggcgacgagtggcggtgccggaagcacccggtggcgagatccggcggcggggtgtgcccgcactgcctccgcgacaggctcctccgcctctgccccaactgcgcgcacgtgcgaccctgcccctgcacgtgcgcgtccccgtcctcctcctcgtcggcgtccggcgaagcggtcggccgggtccacaccctcatcgagcgggagcaccggattgcgcggtcacggtccgtcgccgcgtcctcctccctcgcggcggcctccaccgcatcagccactgccggcgcggtcggggggaggcggaaggcgagggtctgggggtggccgccgttctggaagcccgcggccaaggacggcgttgctgctgcggcggaggaggacgaggaggaggagggggggatggggctcgcgaggtcgagctcggtctccgcgacggtagtggaggcaaaagcggcggccgcggcggcgaaggcgcggtgggggtggcacttcccgagcccgctcaaggcgttccggcaccggagatcgtcggcgagcatgccggagcgaggatgagtgagatggctcggcatggccggaaaaagcgatcagtagggatgtgtgctgctttagaggactaaattaattaattaactagacgggggagattacaggagatttttccttttggcctttttgtggcttcgcgtgctaatcttatgattaaattagaccaaactccaaagcctgtgatttgggcgtaatgtgtgcatatgctcctgccagtggtgttctcttcgttgcttttgctcctttttagcgtgcttgaaaacgttgtagcctgtgtacatcaaattgggaattttaaggtcgctgatttgatccgcactgcaccaggcgttctttttttatctctttttcgacattgacggaatgtgtagtttgtgctttgtttttctttcaggttggagtgacggtggaaaccccgtgtactgactgacaggtgaggcccatcccttgtttgcctgcagcaattaagcatgacagcgctagtattagtctggtactaagcgtactagtaggactaccttggaagaaatagcagtattagcgtgaggtttgatcagtagagcatactactctagtgtctactctatatgtcgaggcttcaaaaattccccgtctaaatcggggtaactgttagtactgatgcggtaatcattaagcaacaggtgaagctttgtccgtggaatctctgggaaaagattgtgatttctcgcgaatgcgagggctcgaatgctcgatcgccaccgctagcagtagtgttactgttggtagctgttcgccaatcagtcgcttgtgggacacgcacgctcggctcggtctcgcccctgcaatggcgcaagcgtccgagatttggaaccctctggatcccgaacgacgcggccgccggccacctcctctcccgatcggtaggcgccccgtcatctcaagcgtgtccgattgtccatgtggctaagtgacgctcccctcaccgcggctggattcttgcggggtgatcgacgcgacgcggctgcgttttgtttcggtggaaacagtggcttctgaccctcatactcctaagttctttattttttctcctttttttttcttttcgttaatccggtacaaaggcatgattgtgtcagcgacattatacagaaccacgatagatgtctgacgctccacggtagatgcatcgagtgaccactgaccgcagccgggggcgtctggtcctggatccctccctgcaagcaaaatggaccgatgcagcttttgtgcacgcgacgcacaccctccttccaggagtactagagaggagaaaacacgttgagcaaaggtagtagtatttcgaaagtcctatcccccgtcctccacgtggtttcttttttttttcaccgcattactttttaattttagtaaatttatacacctaaagtttatagacccaaagtttataagtcaaaagtttatatacctgattcaaatttgaatttaaattatatctggttcaaatttgaacttgaattcaaatattttttatatatagtatttctatacatataaagtttataaacccaaagttcataagtcaaaaagtttacatacccgttttaaatttgaatttaaattcaaatattagtttatagacccaaagtttataagtcaaaagtttacgtacccgtttcaaatttgaatttgaattcaaatattttttatatatagtatttctatatataaatttttccaactttgttttttttaaaaaaaattatggtgtagtaggaagagaagggaaggaggaagggggagaggagtgtataggccatatggggatagggatcgagcgatcgatcgcccattagccacccccgtagtatttagctatttgccttgctcatccaaggctgtggtggtacggcaaaaagcccacgggcaccgtccgatcctatcagccttccgtttccactcgatatcgaaggccctacaaaccatgggccaagcgtggagcaggtaccattgcccactagtggtctactagtgcagatcatgtgccatgactaaatagaacagtgcgatttatttcagctgggagacaaaagctgggaattttttttatttttaattttttttattaaaagttttacaaaaataattttccattttaaaaattgacggaagtagtcgcctaccgccctctgggagggcgatttttaaaaatcgccatcccagagggcggcgaaaatgacgtggcagacggccgttcgctctcgggcgatggccgtcaacaaaatttgcaggcggcccccttgccgccctccgctaaggcgattttgtactgtgcggggggccgcctgcaaatgggcggcgagggggcatggaattttgcaggcggcccccttgccgccctggggagggcgatttttgcctcccccctataaagcccagtcccccctctctgaaatttcattatattcactcaaaatccaaaaaaaaaacgaaagagagagaggggagggcagcagaaggggagcggcgaagccctgctggttcgctcacttcatcacaggtttgctcccatacatcttttgcatttgtactaatatgttatgtttgagtatatatgttgcgttttagttttagttccatatattttagcatatctgtagcacacagcacatatgtgtagatccagagcatagaatataatagtatgaattgagacatagacagtagtgttaattgtaagatgtagtttagtttgatctggagaatgtaacctacttttagaaggaggtcagggtcgtccatcagaaatttcacacagtggattgagaatgagcctaaggagaagtggtctctattgttcgacaccgatggatctcggtatggcataatgacaaccaatttggcagaggtgtacaactgggtaatgcgaggagttcgggtacttccattggttgctattgttgaattcatccttcacggcacgcaagcgtactttagggatcgatacaagaaaattggtccgtccatggccgataacaacatagtgtttggcaacgtagtgacaaagtacatggaagataaaatcaaaaaggcacggagacatagagttgttgctcaaggcacacaagtgcatcggtatgaaataatgtgtgttgataggagcaggcgtggtatctatcgcaagcaagccgtgcaggaatgtgtcttgaaggcggatggtggatgtacctgcagttgtatgaagccgaagcttcatcaccttccttgctcacacgttcttgctgctgccggtgattgtggcatatcttccaatgtgtacgtctcaaattatttcaggaaagaagcaatctttcatacatggagtgaggagatatatgggttcgggatctcaggatcttacacaacgctgagtgcccaagttttttacattccagacccatctaagttaagggtgaaaaagggtcgacgccaaactagacgcatcagaaatgatatggatgagtcagaagcaggtgggaggactttacgctgcagcaagtgtgatctgcgcggccatacttacaagaaatgcccgaagaatgcagaagttccaagcggcgcagatgctagtccatctggacaggcaagtgatggtaggcgaccacctggtgaaggaacaacaagcaggcgcgcaaggccaaggcgtcgtcgcgcagcaggcgattccatggtgtaacaatgctatcgatttaggaaataaaatgatgttgtgatgtgatgagtgttcggactaaatacttctatcgtgtaatttcaattgaatgttgttgtaatgagtacctccgactattgttgtactagtagtattgcgaactattcggtgttgtatcataatgttatcgtgatgagtgttcggactaagtactcatatcgtgtaactgcagttattgttgtaatcagaaatattccgtatggtgacacttttatttgtttgtactcttgtttaatatgtgttagtaattcgcttatgaacatttattacttatgttgaactaattatttatatgtttctgatcaatctatttgatgcaggtatggcgtacgacacaccggcgctgttgaaccgtgggattgacaggaaccaccgctcgttcctgtcagcagtcgagggtgcacagctcggcaccttccgtccacgcacgtcgcgcgagtggttgcgtgtcgacccccgtcacgttccttggtacgcgtatgttcacatttcaactcaactttgctttgtgttgtacttatgtttgaagtttgctctatacaggttgcgtgcggcaggccttctaccactttgtaggcttgttgaggcggcggcggacgaccgtgacccagcgaagcggtgggatgcagaccggtcactccttaccgctctggtagaccgctggagacctgagacgcacacgttccaccttccctgtggggagatagctccgacactgcagcacgtgtcgtacctgctcgggctaccgctggcgggagcaccagttggtcccgtggacggtgtttttgggtggaaggaggatatcactgcgcgcttcgagcaggtgatgcgccttccacacctaggaccggccaacacccttcctccgtactctacagtcgggcctagcaaggcttggttgctccagttcactgtaagtaaataagttgttattatcatacatgcttatttgcgatcaacagagtgttttgtactaacatttcattcttaattgtaggcggaccttctgcaccctgacgctgatgataactcggtccgacgctcccttgaggcgtacctgttgtggttgttcgggtgggtgatgttcactagcacccacgggcacgctgtggacttccggctggtccactacgcacggtcgatcgcggatgctcagccacaggacgtgccgcagtggagctggggttctgccgtgctagcagccacgtaccgtgccctctgtgaggcgtgcacgaagactgacgcgggagcgatcatcgctggctgccctatgttgcttcagctttggacagccgagaggtttgccataggtcgaccagtggtggacagcgcaccatacggggttggtcgcagcgcgcagtggccagaggacggtcccacgatggggacttactggtgtcgacgtggggttagtgcaacttcgctgcgttataagtttatcagtcgtcttcttttttttcttcacataacatgtctaattccgatcatgtttattgcagcgtcgttacgctcacgtccaggtgagacgaggttacccggacttcgtgttcgagtttgaccgtctccagccgagcgacgtcatctgggagccgtacacagaagaggccgtcgctgcgagagcaccgctaggactttcgtcgttgtgcacacgcgaccaggcttactggctcaccatcctgccgatggtgttcgacattttcgttgagcctcactgcccgcagcatgtgatgagacagttcggacttaggcaggtgtttccgggcaacgtgcagccgaccgtcctccctgccgaccactcgtgagttcggattgttcatttctaaatttttatgataattacttcatcgagccatataatttacctctcttcacaggttgactcgacggggacagctagcaggcgcactttgggctccacgtgtacagcagtacgttgacgactgggtgttagctacagaggaggtgatcaacgagctcttcccacacacggaggagaactaccgtgactaccttcgctggtaccttcctcgcactcatgcgcgtgtgaccttcactccagacgccccagagccgcacgttgccgctgtgacggacgcgtatcccacgcaccgtgaccgagactacttcgtgggggtacgtcgaatttgtattagttcttacaattatttcatttatcttgcataatataggacaactactgaattttttatttccatcttgcataggctgatgccgcacgggatatcagtgccgatatcaccgcagtccaagtgaggttgaacagaggtttgcacttgactgacgttgagcagagggtgaccttcgaccggatgcaggagaagatgcgtgcggtcatgcgcgtcttctcctgtcgcagcgccgtggacgtcgtacctccagctggtccggtacaaccacggcctcgtgcgcctaccgtcggagcaggacctcgacctacggtacctgtttcgcacggtactgctcagcccagaggtttcttaagttttgtttctgtttttgtacgaaaacatcaccccgtcgtaacttgatgttccatcctcgcaggacctcgtttgccttcgagcgcccctagcttcggagcagtgcgacctacagcaccggtttcgcacggtacagttcagcccagagattagttcatttttgtttcagcttttgcacgaatatgtcaccatgttttaacggcacgtttcctcatcgcaggacctcgtctgccttcgagcgcgttcacaggcacgaccggcgcttccgcgagctccgcaggggcgttcgccacctcttcctctcacggagcgtcgatccctcgcccacacggtactttactttttattaatactattaaatacctgtatgaaactgatggtccttgttcagtaggatttgcagccgggatcttcgatactggggcctcttcgtctcacgccggtaggactggtcctactagccagttctacgacgacgacttgcacggtgcacaccaccacgacgtactaggcttctctcagcttggaggagctccagaggcacactctcaggagcagccagaggtcacacctgtacaggcaggacgggttggccgtgccgtacccccggaccgactcacgtactcccaggggcacattagggcgcagggtaggagggacaggggtaagaggcctcgtcagtagtgttctacctcttcagtccttatgtgaccgtttcttttggcttacaaacttgtaaagcagtactacttttgctattactactgcagtactacttgtgtttgtctcgtctacatagttcttttcattcatatcgtgctagaacaacttatgctcacgacaacacactttcggcgcttcacggtagtgtcagatccagtagcgcgcacagtccacaacagtacacatgaaaagcggcagctcgagttgtcactatcaactttcggcgctgcctgttgacataaagtgaatcacgcccacgcgtgatcgtcttgtcacatctaatgaataatgtatctcattgagttcacatatattgcagtgaaaacgacgctatataattgacaatctgaaggcaacctcttcatatcttcttccccactagcacacaacacacgaaaatggaagcgccattccttgagcgtctcaactagcgaagcgatccttttgctggttggtttccaccatggtgtgaccgtcctttgtgcgattgtggggatggatgcatactcaagtcttccctcatgatacaaactcggggcaggagattcttccaatgcgcgaactttgatcagatatgcttcatctattcgaagttcaaatggataaaaaaaactaacttcttcgtacacaattgtaacatcttacgcagacatatcgtccaatgtgcaacttcatcgagtgggtagacatggagaacccacaaaacgacggaacccgtgcttacccacgtagtgaaacaagatcggactacctaaggcggaaggatgagcatgaacgtcgaattgctgctgaggctttagaatggcacgtaaatcccctaggactccccacgtggcgtgagcgtccggagtgtcgttgtggtgaccgttgtcaggtcataaggtccgtaaggcaccgaactcgaggacaaaggtgtttcgtgtgtccaaacattgtcgacgatgattccgtggtaattataactattcttttcatcactcctcagtactatcattaacttaactatcccaaaatggatgtacataggaagatgtaaggaaatgtcaattcgtacaatagattgacacagtcagagttacttcaagtggcgggccgataacgcaacctgaaccgaccatacagttcattcatgcttggatggagtacgaacgtcgggtggaaattgcaagcttagactggaggaacaatccattagggttacctaaatggtccgagcgtccaaagtgtgggtgtagagatcgctggcaggtggctacatcctttgctgaacaaacatttcgaaggagatattttgtctgccccaatgtagacaacgatttcgttgtatgtctaaccatttacaaaatccgctatgatttgcacaaaattactacccaaactgaataacattactatttttacagggcaatccaaggatgggtggatttactcgatggatcgacaatgtcactccatcatatcatggccagaagataacagagtcagaaacacaagtagagtatcaacgattgaaggaccacgagaatgcaatgcattctgaccgacctagaaggggccgataggttaccgcatgcttgattcgtcgggatcgacaaatttgtaccgtgtatcgatggcacttcttatctatcttatcattacaatgtttaattatgatggtgattttttgtatgcgtaagactaagggcctatttggattgctaccaaaaacatgccctaccaatattttggtaatttgaatagtacttgtgtttgatttcgattaaaacctattcattggtaatacgtaatctagatttgagattatgtagaacattcttcactacaattttacattttggcagcaaaccaaatatgatcaaatacaattttaccttaccaaatatttggtagtgccaaaacttgcttatattttggcactaacaaaatatttgtacggtaacattccaaataggccctaaaaaataataaaattgtattttacctgtcttggagattttaatcttgtatagttttcaatataaaaagatttgataactatttatatttatacaaaaatataaagcacagtataaaatcgccctcccccagggcggcaagggggccgcctgcaaaattccaggccccccgccgcccatttgcaggcggccctccgcacagtacaaaatcgccctagcggagggcggcaagggggccgcctgcaaatttcgttgaaggccgtcgcccgagagcgaacggccgtctgccacgtcactttcgccgccctctgggatggcgatttttaaaaatcgccctcccagagggcggtaggcgaccacttctgtcaattttcaaaatgaaaaattatttttgtaaaacttttaataaaaaaaataaaaataaaaaaaattccaaatgctggtacggtataaacaccagcgtcacacgctaactcgctttacaggccagaactttaaatcagaaaggaaccgcttgatgattgcattttttttttcttgagagagagagagagagagagagaggatgattgcaaggtcagcacagcaaggaaagactggccaggaaaactcaactggtagaactttccgttgggaagaaaattttgcatctctttctagcttcatcctgcattccttccactgatggcaaacaagtactccatcccaaaataacaacggagtaaagaatcctgagttcttcaaccctccgtgctaatcctaccagtttataataacaggcagccaaccatgtccagcaacaaaatatatactgcaactcagatataaggacgttgtcccatgtgcctgaatggagggcgtaccgctaaaattgctagctatataatcaaaacatgcatcaaaagaatttctccagtgctcccttgatacgagtaacacatacttgaatggagatttcgagatcaaacaccaaactggaactagtgatccgaactaagcacattttaatctcagcatatgttcatcatggcagatctgtgataaaactgataacaccagaactcttctatgctatattactgcatggactaaatgtacagaatatgtgaggttatgttttactgtcatctacttctgtcaggcgttcatgagaaaggataggcttaatttgtatttgtgtcaagttaaacaccacgaaactgttgctcttttttcggtgagaagccaagaactacatctggaaactgcgtgcatgcatttcttgcagcaaaaatacattagtatacgacagaatccattgttgtgttacaaagaacagagagatgccctgccgtatccatagttgtgttaaaagaaacagctaagcatccaattggcctcaaagaaagtactgaagaagctcatggacaaataagatgtacctatagatcaatggggctccaattccctcaaatgccgggccctagaaaatgaaatcataaatactgtattcgaagtgttcacactactattaggaatcatgccatgaagtcttaagtcttaaccaatatgcaaaacaaatttagcatcaggctcaaatgaaatgctttaccattttgaagaatggtctatgccaagaccattgcaggtaagtatcatacccttaaaccttgtaaggtactcctaaaagcgagggaaagacagcaagaaaaatcaacacaaagcgtgtagaagaggaatatggaaggccaattatagaagacaccttacacgcaaagtatatcgatttaactcataacatccggaaaggtcgtattcaaggcgcttagctggatcacttagaactgaaaaaacggaacataaaaaaaagtgaatcaggcaatgacgataacatttatctctaggaagtacatccatattgagatcccaaatttatctctaggaagtaaatgaggataataagatcatctgtgcctacataatggagagtggaaaatacctgtgtaggcttcattgatctcctgaaatttagctgtgacatcattatcccccttatgcttgtctggatgccacatctgtggatgaattatcagttacagtgtgttaatgtattattatttgcgtaccccgaaagaagtccaataacagcataccaaagctaatcttctataactcaatttgatggtgtcatcggatgcatcgtaatcaacctccagaactttgtaatagtcctgctattccaaatgaatataatgaataagacgtattaaaaaaaagtgtacctgtgcaagaaatagtataattgattatggacacttttcagaatatgaatggcacggtagtccacgtcacgagtacataggcggtaaagtgagtttattttggattagcatgacttattaagattaagtgcccaaatgatagctcacagcgcaggtgagttgcatattaacagagttgtaaaaaccatataataacacatattgagttcataccatagcgaagcatacaagtggcaatatacaggcttgaattgcctagcaaccccgatgtcttgtaaataaagatacactaaatcgcatgctgagtaataagttgtttggttgttttgcaccctttaaccacccacaaggccacactctattaatagatgttttatgcttgaataataattccttcacttcgtcagtagataacatttgctgtgaagaatagtacagacaaagcaacgcatctgccaagaaagtagaacctagtttgtgcaattcacagcatttgtcttagatgaataaaggacatcaaggtaaggaaattggtttaagcaaaaacaaacatcagcaatgcattgatcagcattttccaaatggctgcaaaagttcaggttaaaaaagaaacagctaacaggactcctataatattgtagggtggtgttcgacaaggagacctgacgggccgttacaatacaatggtgccacagattgaacctaaacaccagtcttcgtctcaaaccctcagtgagagggttgtactaaaaggctcaattcaccgattacagaccataggttaaatgtcgatcctgtgctgctgcattaatcaagaacctagaaacatttgcgcgaggaagatgaacctaaatccaccatacggaattcggccactcggcacagttgaccatgactaaatctggccaccagccaaacaatcatatgctgtccactagcgagaccgcgggcaaagcaataccacagtagctccagtactatttgtagccatcaatcacagtatcaaaatgccccaggagaaaaaaaaggtttggtccagaaccaaccaacaaattattgggaaggcctatccacctttttcctggccacagtgaacgaagatacaagtcatcggccactccaataatagaaaacaactggttcgcgcagccgcagcacagctctcttatccttctatacaagcggcacgaccaaaaccaaatccagccatagactgacgaactgaagctcaaacactcgatctctctctctcgcgcgcgcgcgggaataatacaaccggaatcgcggggggacgcgtaccttgtggggaggcttctcgcttgctccgtccatgcagcgtaacaattcatcacccccagctgatcctctcttctcgtcgtcgcctgtttcccttcctcgtgtccgccgcgcgcgttggcggcggcccggctccccgggcttggcttgggggatccgggaggaggaagacgaggggcgaatcgatcggaggcgagggcgaggccgagcgagaggccgccggagtgggtgggatcggagccggaaggagttccttgtcctctcctccctttactttatttcctatgcttttctattcccctgaatttttttgcaactttggtgatggataatagggggaggagatgacgtgtatccgacccggacacctgtcctttcgtgtcattgggagcgcccgctcgtctcgcggcgtcacccccgtgaccggaaagagtgtggggctccgatgcaatgggcctggtccacagggaattattcatgggccgttctggcctactgcaaatctgcaatctgcagtatatgctgctagtaattggcaaccaggcccatgaaaacatgcaagaaggaattagctcaacactgtatttgctcggtttacttctgatccgagggagtagggcattttcagatcgtagcaaaataaccttattaaattttagcaagatggtattattgccaaaatttttgcaggattttttatatatttaacaaatttagcaacaaactaaacgtatataattttttaataactttgctaaaaaaataatatggttaaaaatggcatcaaagtgaatctgtcctaagagtttcgctgacaagatacccaatattgttttctatcccgtaatttttggttaaaaaaagtcggtttcggatggttcatgatctattcttcttattctccactaatataaagctccaactctaaatctaccacgatcaacaagagggaagatcgcgctcagaaagcgcagaagttgagcaggtgaggagcggaaaacgacaaggtggctcatcttttatttgagagagttagatatatactcactccgttccaaaatataacaacttttatctcttaggatttatcccaaaatataacaacttcttcatcaacattctctttccaaccaatcacaaccatccaccatttattttttccacctaccttcactactcgtctaatcacaactctctatcattcacatctacctactttaactctaaaactttttatatcgtgggacggatggcgtattaaataagtttttttattccttaagttcctgagattaccaaatacttcctctgtccctaaatatttgacgctgttgacttttttaaacatgtttgaccgttcatcttattcaaaaaatttaagtaattattaattctttttcctatcatttgattcatcgttaaatatactttcatgtatacatatagttttacgtatttcacaaaagtttttgattaagacgaacggtcaaacatatttaaaaaagtcaataacgtcaaatatttagggacgaagggagtaagaagccacatttgtttggcgctttctaacttctattttcgtatctttcacacgcacatcaaactactaaatgatactcgtaatagtatgttattcggaaaaacattatacataattgtagttgcttctaaaatcatattagtatatttttcaaaaaaaaatagctaatgctacttaattaattatgtgttaatgtatcgttttgttttgtgtgtcgggagggaagggtttccaaccctctaaaacaaacacagcttccaggaggaaagggtctcatcttttcgcttatacttacacttatcagtcaaaatttgaattttcaaacttaaagttggagcttctttcgaggttttttattgaagtttatttttcagcatttgtatttagatcactaagaacgagtatataaatcttttattcacaatttgtttatttgcaaatatgtcgttttgcttattccgcaaaacgatggctccaataattttatgaagctgctggtgatgctttcaggatgtttttctctttcaaactggaaggaagaaaactgttcgaagagtgtcatgtaatgggaagaagaaaacatcttcatttatatatgctaacgatcataatatacaagcaaaagcaactatgagcaaactgtcgcatgagtcctaacaaatgccatggattaatatgatgctattgaagcgttatgcaaaatgtattgaagcgttatgcaaggtaaaatgatgctattctatataccggatcgaaatgccacaaaacttaatcaaatattttcaattaaaaaaatgtcacctaggactggtacagctggcttttgaatcgaaaattttgaaagtttgaagaaccggcatctttttataccatactagtaatacactcatactccctgtcgaggggtgaccctctttagcgagaggctgtgaggcccccctttgagagttcggccgggggcaactggtgagattagagaatttggtgagcgaaactgtgtgtgatcttgatctcggaggctcctccaagacgatgagacaaaagaggtttatacaggttcgggccgctatgaagcgtaataccctactcctgtgtgtatgattcttctgtgcttagaaagtccctgaatctctggtatgcaagctatggttagacaagctttggctcagggatcctccgtccgatcccccttcctcgctaggcatggtcctccttttatactctaaggggataccacatgtgctacgagtgctacctagggagaagggaaaatattctctatattaattacatgtcttgtgccttagctcagaagctatctgcacgtcggttgctgcgcggggcccatcaaatcatgcagggcgcccttgtcattcgtcatttaatggatgaggacttccgggttctcgttcacaccagaaaacgggaacccggtcagttcagagtggttggaccaactctgaccggggtaagaggctgtgaagcccctcatcattatgatgggacgggacagagcacgccgctcaccgcctgacacactgacagggcgggggtacacagtcgccgtcccatcggttattcaaccggtcagatgcgcagcacgccgcattaaatgcgacatggcgcggttgcatagaccgctttaaatgcagttaggtggcagttaggcgctcccacctaaccctgtacacgtgggctgatacatggaggggtcggggcagctcgaccccaagcgagggcggcctcctccctctagcttggaggggggcagccgccgcgccaccccaggctcaacccccctcggggggagccacgtgggtttgggggcggcccaaccccaagctgggagggggcagccgccgcaacaccccgggctcgacccccctcggggagagccacgtgagtttgagggcggcctcctccctctagttgggagggggcagccgccgcgccaccccgggcttgacccccctcggggggagccacgtgggtttgggggcggcccaaccccaagctgggaaggggcagtcgccgcaacccccgggctcgacccccctcggggagagccacgtgggtttgagggcggcctcctccctctagctgggagagggtagccaccgctccaccccgggcttgatcccccctcgcggggagccacgtgggtttgggggcgactcgaccccaagctgggagggggcagccgccacaacaccccgggctcgacccacctcggggagagccacgtgggtttgagggcggcctcctccctctagctgggtgggggtagccaccgctccacccagggcttgatcccccctcgcggagagccacgtgggtttgaggacggcctcctccctctagacgtgatacccccgggcccatatcaccggtattcccccatttcataatgtaagactttctagtattgcccacatttatatatcattaacatctatatgaatatggacaatgttagaaagatttacattatgaaacagaggtagtatgttataacagatcaggcctgattgactataagaagattagtgatgaaactttggatccatccaatgattacctaagtatactacgcgtgcgagtgcggtgcgtgatgagagtagggaatggattggaaggagaacacccctcatttgaaggtagcatagaaaattttagatctaaacttatttgagtttggagaaccatactagaaatatgtttcatagcttgtgtcgggttagatcgatataagtagtaataggctataaaaaatattagtgaaaaaaacttgcatccggtggttacctaagcacactacgcgtgcgaatgtggtgcacggttagaagagggaacaaaaggaaaacaactctgcttttaaggtaaaagacatatccatctaatcgaatccttaacactccacttaacatgcggggttgatcatggattcgtggcggacttctagccccatgggagattagctaccttgagctccacctaaaaacaacatgtttttttttcacgaaacaatgttcattgagtttaatctattatgatttttccccttcctttagccccataagagagacaggtactgatatattaactcgaacaacgaaaatagagaagaggaaaactaaacttcatatcccaagtcgtcgttttgacttattttctagttaaactttcttaactttaattaaatttataaaaaaaattagcaacctactaaacttaaattagttttgttaaatctagtattgaatatattttgataatatgtttatatttttttaaaaatactactctcttgttcctaaattgatcatcatataagtttatacactaagaccaaggataatttaaatcatatcaatcaagacaccgtacacacattctcccataatgcatgcatcgattaaaatcccataccaattacaccctaacatgcacacattatcccatactgcattaattgtattccaataaaattcgtgcccatgcaattacatggtgatcaatttgagaagttttggattttattacaggatgatcaatttagaaaggagagagtaatatatttttcaataaactcggggaaacataaaataatttgactaaagagaagtcgaaaggactgtaatatgaaactgtgggacccaccactaaaatgacacatgccgttgattggttgacacagatcggattcggaacagggaagccgcatccgcagtgtgttgacccacgcgacgcaggaaacggaaacgcgggagcgcgccgaaaatccaggcccccactagcccccccacaggcgggaaacgcgaaaaccacactctccccatcccgcctccttcctccgtctactcagtttctgttttttcacattttccccgtctcctctcctccggtcctccctcccacccgccgcgtcgtcagttttaacgcgcaccccgccccgcctccgtttcaaacccaaaatatttccgccccctcctcacctcccaaatcttcctttccctccttcctcctcctccttcccacccaacgatttgccctactttttttgctttcccccgccgctgctgcgattagtctccgatctcaaccaatcgaccaaccaaagccttcccctctccatcgattcagcagccgcgcgcgagcacgcaccaaaccgccacctaccgcccctccccgcgagcgaaaaccctagcgcgccctcgccctcgcatggcggaccagaacggcgccgcggccgtgagcgaagcggaggccgcccctgttcaggtgagatcctccggtctgcttgcttgtttttctgcagtttctggggggagggggggggtgcttggggtggggtttcgtctggtacggccgttgccagtggtaccttgcgtggtaagactggtcgctgttttttttttttgggtttactcagaacgcggttttagtcggcgggctggcttgtcgtgtggcgattacttgtgtttactgctcatttttgcaactcaggatgcgatcttagccaaacgtgtttgatttagatggttttggagttttgtggtgcgtttcgattgggttattgctgtggttctaccccaatattaagcagggtacatggcattcgtgtgctgggaatctggtagcaggtaggagtagcgcctcaccaccactttttattagtacataattattgggcaacactagtgacattcattcatggctagtagacgacagaaatcgtggtgactatcatgctgctttcccattttgtttgtgtgcaacgttccgcagtgtagttcaacaaactgaaacgatggtaatttcgacctgccttttaccttctgttttgtccaatttctgctagtacttgttacaaaaggaaatggtctgtagttttggatcatcgatacatggcttatttctgacaattgagttcttaggttgaaactggtgctgaaagtggggatgctgaaagtgagcagtaccaaccatttttctccatgtgccagccgattcgctctgttgtaagatgttaacctgacttccttgtacaaatatttgattacatgtgttatcatttctctttgaaacaacattacatgccttttttgtggctgctaattttttaactttgtcggtttcctggttttgcctgcagagctattcaaattcctgggatatggtttgtgcccccacaattaagagtaacgaacacaatgtatactcttatctattcttttttgcgattagcttgttgtcgctctgcttttggcatagttaatttaatatgcttcttctcatacgcagagcaacttggattcgatggatgataaatacatgctgagtgcaccttggcctgaaaatgagcagccccagtctgaggtatttgctaacctttctaagaatatgattgtcccagtcagtctgtttgggttccttaatgctgattttcaccaagtactgtttattaattttcactcagagcatttctgatacagtagataagaaagcaagttatgttcatgtcctttaataggtaatgaacccactttagtgcaacatctcatggaaaataacaatcaatggtatgaagcataagccttggtggtttgtttccctgatcatccctagggaactacgtgcctgttgtattttgtgctccgtgctcttatgtttcttcatgaaaaatacaattggtactctaattacttagtattttgccattttactatcttaatttgaagacttgcatgtagggcaccgttttgttgtgtgatatcgtgcagccctaattttttggactgcaggagttcaattgttagcttagactataaaaagttaatgtaatctaattttttagattaaaagattgggtgcccaagtgatttttatgttgcagctagctatgtattaccatgacatccctatacagtcggttgtatctaaaaatttgctaattttggctgttttttttcttgttcctttttttcagaatgacatggatttgttagatggggatacaaatatgcagtctgaacccctcagcacagagcagcctagctccaatgtaattttctatctatttgatcttctctggccctttgtaggcatgtgacccagttatatgtttaatggtgcacacaataagccttgaactgaaatatcttatccaactattctacataaactgtgataaccaggtgcctagagctccctaatattattgttggtggtgctgcaggatgaaatagatatctgggatgggaaaactaagcaagactcatcatcccttcttgacagcaagctgtgcaactccggcgtaagtggcttcacaatcacacctattactccctacaataaaatgaattgttttggggttcgtgcagtcaaactttgtaaatattagctgctaatgtgtctccagcagtattttagaaactatgcttataccatggcttaaaattatattataagtttataaccaaattaacagccaaagttatgttttagagactgttatgttcaaaacagttatgctaatgccattattttaatctttcttaaactgaacaaattggattgataaaaatgtttaacagagcggcgctgaaccttgcaacatggagggccaacaattttctttgtccttttcccgcaacactcaatctcaattggtggtatgttttatgcaatatcttcaaccctaagacttacgtatgctaatgacatattcaataattttgttatttttaaaatttcttcatatgcagggatctggtcttggcaatatggggaacacatgcttcctaaactcaattcttcagtgtgtcacccatacagtcccactttttctcaggcttcgttccactgatcactgtgctccatgctcatgtatggatagtttctgacagtaatgttttgctacctgaaaaatgtgttatctcattgccatttttgtttcatgataaaaaaaaaactgttggtctcctgcagatgataaagatggtttctgttcattctgtgctcttaaagaacatattgatgaatcaatccgaaggtctggatctgttataaggccagtgaggttcagagataatttaaggagtatcctttgctctcgatttttccttgcagtttaattttaccacatttgtgcacacatgctcagtaatatgacttgcatttttgacaatcattgggtgtttatgcctgaaaatttcaaggttaccccttatatgatttcataacttctatttatatgcttcctcagttctgtttcaatttcaatacatcttaatattcactgaatattgtgctgagatatatatcttctattgtatctgtctctggtacttcaaattagtggtggagttccttgacaagattacccagaattatcatcagattttagaccaggacaacaggaggatgcacatgagttcctacgttgtttgctggacaacctggataagtgcaccactgatcccaagccaaaggataagccctcatcttttgatgaagaaagtattgttaagcaggtttttggaggccgactaaaaagcaaggtattttactttgtcatcatgcttgttgtcttggcacttaaaagttgcaactgaattcatcctgtctatctagttgacttgctgtgagtgtggacactgctcggagacatatgagcccttcttggatcttagcctggagattgatcaggctgataaccttattgatgccttggaatcttttaccaagttggagcgaattggggatgctgaggacaagctgaactgtgaacattgtaatgcaaaagtttgtaagaacaagcaacttatgcttgatagatcaccagatgtcgttgccattcatttaaagcgtttcaccagccttgatagatctgttgaaaagattgacaaacatgtggtgtacccactagaacttgatttgaagccattccattgtgatcctgacatcaatgtgagtttttctactatctctatttttagcaatagctttaccaaaggcatgttttgatgttttacttgtcccaccttatgcagaaggagctgaaatatgatctttatggcgttgttgagcattctggttcacctagctatggccattatgtttgttctgttcgttcttcaccgagcacttggcatctaatgaatgactcccatgtatgtgtcacaagttacttgctattacttttttttaaattaaaaatactaccagggctttgcccagtagttatatatattaagagcaggatgtgtacagatacttgctattgcttttaggtttatcatggcatgaatcattaacctctgcaaacctttgttgtaggttgatttgattagtgaggcaagcgcgctgaaccaggaagggtatattctgttttatattaggcagggcaaatttcagtggttttcaagtttgctggagcaaaaggatgacctgcatcctgaaaatacgagtggtgcatctcccgtttcagtattggagaatatagatgtggattgtccaacatcctctggtgaagcaaccaacagttctggtgataaattagagaaagatgaaactagtcaatgcaaaacatctttccttgaggagccagctaagggatgcccgattgatggtatcaacaaggctgacctaaaagatgaaatcgtgccatgcatatcatctcatcacgattgtgtggctaataggtgtcctggtagtgctgctgacattaccaatttggacagaccctcaactccttcgccaaaacgcaagcgtttcttctctgatgataatgagtttaatgtgtttgagtttgaggacttcggtgacggtaagtcctacatcttggttccattttcttttgttaccaagttctctgcagcggaacagaagttcttacgcactaccctataactgcacactgaattattgtctagttatcatatcattggtgtaccactaatagagagattttaaattcattgatagacatactgttgctgtgctctgccaatgctgattacattagtttttcttttctgctaatttatcgggttcattgtcttacatggtactactgtacattgctttgctgattatcctttgaaaattgacgaggctgacatttctgcttgtgccatttgcagaagatgagacccctctgcttggaaaccttaaattcacatcaaaagctaagaaggctaaggttgaatcagcatctaaatcgacgaagggcccttgcatagataagaacgtaacacgattagtaaggagtatgccgtccactcggagaaaaggcattgtggactgcttgagccaactcaatgcagagcaggattctggaagctgtcctcggagtcaccctcttggcaaaaagaagctcggcatcccggttccaatcaaatggtagcatggtccgagtgccgaagcctttttttttccagctgtacatgttagtttagcatgcattttgttttatatccagaaccaacaaattttatctgcttgtcataacctgtatgaccggctagatggtgatagtgaggtacatttttgctgccttctgatgtggaatgcctcacctatatgtatggaacatgcactcggagtcccacttcatttgtgaaaaacagtggcaaagggaagagactaaaaactgaggagttttgtgtgggccggtgccgttcttcttcaaagtgtcctcgatgggaaatgggttcagccaagctacagcgaattatccaccaaacgcatccgtgtataggactaggagcgtgtgtgcgactgacggattgccccgtcagtttgtcacccaacagccgtggtccatcgcaacgatggagaggtcccaattcaagaacgaaacacataatcgacaatcgagagcgcgcacctgcgcgcaccactcacctaccgaagccattatatggcatttggcaacagaatctcacaaaggatcgcctctcaaaatcgttatgatcgcggcatagcacaaacgagtgaaaatgacatgcaatttggctgttcacttccgcgcccaaacagaccatttcatggacagattcacagatcactaagacaaggttccatgaaaaactgaatctggttagcagtgcatatacaatgatgataagatcagctgttccttcgatctaaacaagatgttaaacagaacaaatgggtcattttagctctggtggcccatcttgttccccagaatcataatgttgtgacagtgaggtgtccctttcgcagcaccatgcacaaagggttccacaagtggagaaagaaagaggggcccttgccatgttctgttgccctttggccggccataagttgcaccgatccaaacaaaggccatggaagcaaccaaatgcaggatcttcatatgtacacagaaggggaggtgagaaggagttcgcgtgcaagtgatcagctactgctagctaccatttctggccctttgccttgttgcttctcgttcttgcccaacaatgtcggtgtcaccgaaacaaccccaatcaagaacaacagtgctattgattgtttatcatataggtcactcaatgagctcaagtctcccaaagctattccagcctgtatttcagaaaagaaagaataaagcatgagctatgcatgagaagaaactagaatagtatgtgaatttgaagcaggtgatttaccctgacagtcacataggcagctgggattagtccaataaaggttgccaggaagaaaatatggtagggcacatccactatcggcgacgctaaattgatgaaagtattgggcaatgttggagttactctaaggaaaagcatgtaattcaacagcttctctctcctttttgcaacctgagaagaagaagcaaacagcatcagtcagttacagaatcttgacggatatcgaatcaaagaatcaaaatgtcgcatatcgaacatataaaaaacattgccatgaactagaacacagggagaatcctaagcgatatcagctgactaagatgcaggttaagaagttacctgcttctgaaagaacccaagtttgtccggccacaatgagaagaccaacggtttcccaatcagcttagacaggaagtagcatgaagaagctccagccgtggcggcaaagaccacaagggcaacaccaccaagctggccaaagagtgctccggcaaggagggacatgaatatggttcctgggatcatgaacgtctgcatgaagatgtacacggcacaatagcccaccagcacctgcacggtgtagtcgctcgtgtagtcctcgagatgatccctgcaaattaaacgtacacaaacattagaagcagtttaatttgaaacatccattgcccactgagacatcaaacagtgtaactgtgtaaggttgaacatgtgtagagtttcagacaaattcaagaacacaagtttatctgtttatctgaatagtgaagtctgaacaatggtactatttggcaagtggtgtttaacctaacagaaggccatagctgaagagagttcagatgtcaacaaaacattgttatggcgtgcagtgaccaaaaaggcacacatgatggaactcgatctgaccaatggccaggttcaaaacgcacgacagttacagctgggcagaaagtaaataccgagaagaaaggatttcatactccaccggctgcgaaaattacgcgattaattatgcttttcaatggattaaggggaccacaggctgcaatgtgtatgggccatacttggacatggataatcaggtcataaatccatgttctaccactccactaaaagtggacgccctactgtagaactcttgcaaatttcctaccgtcaccgtcagaaaagttttttcttttaccgatgcttcattttcagttacaacaaagcacttcgtgtagtactactagacaaaggtaacttgttcaaaggaatcactgagaccctttccaaatttcctttagaaaatatcctctctaaatcagtagaaatccacagaccaaaacgaagactgtctcaaaacacccgcaaaacacacaatagtggacggatttattattcagataagcaggaaaaaaaaactacagctttgctactacaagtccattatccaagaataatccgttacgttccgaaatccagcaacgcaccaacgcagttcaagcggaagaacaggatgaaattggtatcaacagtgaagatgaataaaatctttatatttggcaaaagtacggaacatatacgatgcaatttacgtacttacattctatttgaagttttgaacacaaaaaataggattcttcctacaggtaagttctagtaaattaggattcttcacaggtaggttctaaaacataaaaacgcacaaaaactgcaaacttttgagacaaaaaaaaaagagaagcaagtttctatcgaacaagcagtatcagcatatgcatagaccagctgaacagttagaaacggtatcggtcgaattacgtgaggatttggagctcctggaggttcttgggcagcttgaggaagctgtagtccgaatgaggcatggagaggtagacgccgacgagacccgtggcaaaggcggccgcgacgccggcgagcagtgccgcctcccacaccgggaacctctcctccctccccatctcctcctctctttcccctgtaaaatctgtgacgctgcgcgccgctggccgtttgggaggaagaagaagaggagagctgcagaagggaagaagaggaaaacggaggaggcacagtagtctcccttttaatccggacttcacaaatcacaacactgtgttttctctctcctgtccgcctctttttttatgagttttcttggtgaaaccgttttctatctctacttccttttggatgaggtttgcaagtttcgtatggctggtgacttttagcaaaactagattcagattttgtttggttgtaatcggcttcctactagtattagtttcagcgaacccagtattttccaccaagaatttggtgacttgaagcacacacccagtatgtttcttctcctccttggttttgtattagtttttgtactaggaaaataatatatggattttttttgacccctgctcttttcagttttctttttggatttttgtcgcggattatttgctcgatgcttctaaaagtacgataattcttctactccatctgtcccaaaatataataactattagcctttaaaatttgttctaaaatataataacatctccaccgatattttcttctcaaccaatcataaccctttgccgttcaatttctccacctaccatcatttctcaaccaatcaccatttgattttacatattttcttaataatcgtgttaaactttaaaaattcttatattttgatatggagatagtactatgttagaccatttattcaggagtatctataaaatttatttctcaaaatattaatttattgcgttaatcgagtaaaacatatatgtttcaaaagggccttgggacacaaggatttttgaagttttttgggctaattttaataaaactatccaattcttacttaaaatgatttttttcccgcacaacaaccagagaaaaaatattaaaggaaacctccttttgtttagtgtttagctcaattccctagcagatttccattcccctttcatcggttcgggcggacgcgtgctgttgaagcaaggtggggttacacttatactgcgaccaaacaccggccgtgactctgccgctcgtttgggttcagtggcatggagcttttcgtggccacccacaaaagtttggtgagtcatgaacaattcgccgagatgtccctcgcatacaagaggcagcggttgagcacgcacgccaattgtttgtgataagtttctctctagattacccctccgaatacgcgtaaaattcacctccatagtcgatagcgtaatgctcatttttcccccctagctgaatactcggttgtgtttgcttcaccggctcttattaaagacgcagaaacaaaacgcacgccaggtagctgaatactcggttgtgtttgcttcaactgaatgcacgcaactacaacatgtctgtgctcacggggttttgtatcacaggagcgtgcctctgaaatctgaacttctgattcaaactctcgaacggtcaagtggtcaagcctgccttccagggtaatctgttgccattatcccttcgagcaaaggctttgctgttgcttcgtcttgcagtttatcccaactgctgttggattggcattggcctagtcgtggcggcaagtgttgtgattttttattcagaaagggagatttcagacgaataatcaggtacagtagttgcaagcaataaaataagatgcctttgctgcatgattggcagttgttggaagctattgtttgtgtacgaaaatggagctgaatgtaaataatttcttttatattggaacgtgaacctgtaaagaattgcttggacggagcttgtttcgtttcaggtagcaagtgtactgtgtctttgttgtggctgttgtttctttcctttgcacggcataagcagacaaacgtaacggtttctgtggctgctgtttgcgagcatggatgcagagattgcagacaaaaattgataggaactgctcgaaaatcacttggtttatgaggctggagatctccgagcaaagaactgtatcattttaagtggttcctctcgcatgagactgaagcatcacctgaaccaattggccggagaagctggctagcagcagaaacaaggccccttcttttacttacagtagtaactcagtatatctgtcccaaaaaaaaccaaatcctggctatgaacctggacacgcatgtgtccaggatacatgtccaggttcgtagctaggattggacttttttttggacggagggggtagtcagtagtactaatctccattccgtcagacaccacaggcctcaactctaccgaccgttggacagaaacaagaggaaacctgactacctctgttaatatagtggaccagcttttgtatggcactacggctcttgtccccttggtagatctcatttcacccagcagatcagcagtgtgcaaaaaggacgtccctttttagcacgtgactgcctatacaatgtgacagaaaattctacacacatcatgtgaatatcagaccattgattgatgccctaataaccataactctctaccattcctcctcactctcgtgcgccgctgcccgaagattcccctacctcctctacgccaccacatcgccggtcgtcctcgacggtgccaacgagtcctgctcacctggcctcctccttctcaagctggcgacggagagtgccttcgtcgtcatctttcctgtctccagcggctcctccctcccaatgccttcaccctcacctcctaaccatgtgccccgcattgtccctactgccatcaccagcccatcgcttgttgtcaagcctatggctccgtcatctcctatgaccatccctctaagcttaggaaccttttctccttccctcatcagtcgtcccaaaccctagacccaaactcgttagaccatcgttggacactccgactcgctatattttccgtcaaacggaggttagtgattatgttttaacacctttgtttcgaaaaacaaagggcgatgaatcaagttcgacaacgggtttttcaacgagtcgtacaaggaaggagctataggtactctaatatttgtattctcggtgtcatggaatggaagagataattaaattaattaggtattgaacttctaatttcctttagaatctagacattattccccccccttgcttccgaaataaaataaatagtaaagaaacactaatgacgacccttcgagttgacaaaattcataaaattctccgtgaacgtattgaacaatataataataaagtagggataagaatatcggtcgcgtagtttaagtggggaatgggactgcttttattatagatcttggtgaaaaaaatgtcaagcgaattagtcgaattggtagaagggactaaggtattgtcctgaatttggaattaaaaaaaagttaggattgtactaatgggcgatgggagttggctgccaaattgaggccgtgtttagttctaaaataattcttcaaactttcaacttttccatcacatcaaaactttcctacacatacaaactttcaacttttccgtcacatcgttccaatttcaaccaaattttcaattttggtgtgaactaaacacagcctgaatgggcaactggactgtgcatcatgagttcatgacatgatcttgccatttactagcggtagccacaattgaaattctgaaaaaaaaaatgcagacaaagttgagcaaacgcccaaccatgttgtagcttcccatctgattcatggccacataatttccgctacttctatagttctatgtaaataagcgaaggaaatgattttttcttttgtctttggtcctcttaggctcatagtccatagacaagctcattggatgaggctaattctgggattgccatcgagatcaaattccctgtaggcgacgtcgttttataagtgaatatctaaggatgttgaactatgtggcatattatcggcatcatgtgaggaatatgccataggtaaaattagtagggaactatcgtaaggcgaaaatgaaagcggtgcaatccagtcgtgaaccagggaaacatcagtacatacatcatctaatgctgcctgccgtagtggcatctataagcatcatattccattattccttttgaagcatctcatcctccgttggaaatctccctcggcctttttcaccctcctttctatcctcagcatttttaggaattgtgggccgacttgagttattgattatcagcagaataagttcatcaaaagtcccttaactttacaccgaatccgattttcaaccttaaaccccaaaatcagatacagccggtccctaccctgtcaaaaccggtgcaaccaatgtccctcggcgttttggaaggcggttttggctgacgtggcgactacgtgacaattatatcttggaaaagtaataaaaaaggtggacccacatgtcagctacacccaaaaagaaataaaaaaggtggggctcaagtgggtcccacatgtcattcacacccccctcttcttcctcttttctccccagctcctctctcttcatccccctcccttctcctctctcttctcgatggtgaggacgcccggtggaagtggtgaaggggtggaggagcgaagcggcgaggttgagctggtagcacggcgagcaacgaggcaatgtagagggagcggcgagaccggccaccgccgacaagagcggcgagctggaggaggaagccggggcaataagagggggtcggcgacgacggtgagtggagcagatcgacgcgggcagcggcgggtcccccccaaagcagcgtcggcaaccgagatccaacagtggcggcagggagaagggcggtggctggcggggggaaggggtggcgtgcagcggtggccgccggaggaggaggccgtccaccgcgcgctgctccctcccccgctgtgggtgatggaccggtcgcgcgtgtggtgggacctgtgcagcagcgtcgactactcagagcgacttccgccgcgccgagctcgccgccgttgtcgccaaggaggacaccgccctccgtgctgccatccccgtccgccagcgcatcaccgtatgcgtctggcgcctcgccatgggagagccactcagcaataggacgcagtgctccccgtatctcctcctacggcggctgatggagagaaggggcggcgtgcggcggtggccactggaggaggaggagatgcggccatgcggggaggtgtggcggtggcagtcggcgcgggaatggggacaagagggatggcaaaaatgaggaggggatcccgccggccatcaccaccgttggcggtagtgagcttcccgcccctcagccacgcctcacccacggcccgcagccacgcagctctgccgatggcagtgacgaggagagggatgaagagtggtgagctagggagagaggaggaagaagggggtgtgaatgacatgtgggacccacgtgggcccacctttttaatttttttaggtgcagctaacatgtgggaccaccgtttttattattttttggggatagaattgccacgtaaacaccacatcaatgccacgtgggacgaggaccgagtcaaactagccacgtaggcaccacgtaagctaaaaccgcctttcaaaccgcccagggacttcatttgcactagttttgacagtttagggactggttgtatctggttttagggttcaaggacaaaaatcggattcggtgtaaagttaagggacctcagacgaacttattccattatcagtacaccccaacatcaccggtagtttatatgggccggatctacctcacatttaaacaacaaagaagtctattatgtgtctcacaactatagccccactctgattttcttcctcaatcgtaaaatgacatataaatgttccttcaactataaagatcagatcaatttacctcatcggtggcagagttcaagaggcgattcgatagtcacaaatccgcttcaaaaatcggaaactgcgccaacgggcagacaacgtttgggaagtggattcggatccgataacaaaatatttcagcacgcgctggatcaaacggccaaaaaaatcaaatgttttcagtccccgaaagctaactagcaaaacccaaattctaattggaactttcgtgctgtcccgacctggcacgttagtttgtgtttcttaaatcacaactatctctatccctaaatgtatgagcctactatgggatattctagtaaggtgttatattctatattagattgctatattttgaaatagagccgtactatgttgctatattatgagtcgtatatcataccatttgccatgaatctgcttatgtaaatgtaatcgcgtatctactaaattcagttatttaacttgtacagaaaaagagaaacaaatccaatactttctcttgtacataatcgtgaacccctcgttttacaatggaaaaataattgaatcttaccgcagcgatttgtttcattccatgtactgtactccttaacaaccaagaagaagcggaggcacacagcaaatatacagaagcacaggagatcgatcaagatcaatgcctctgcatctggtcctgctgctgttgctgctgctgcaagctgacgagcttgtggtaggcgccgttcctgttctcgatgagctggtggtgagcaccctgctcgatgatcttgccgtcctgcagcaccgagatgacgtcggcgttcttgatcgtcgacagccggtgcgccaccatcacggtggtccggttcctcatcacccggtccagcgcctgctgcacgacgcgctccgactccacgtccagcgcgctcgtcgcctcgtccaggagcaggatggccgggtccttcacgatggcgcgcgcgatggcgatccgctgccgctgcccgccggagagctgcacgccgcgctccccgactctcgtccggtagccctccggcagcgcgctgatgaaggagtgcgcgttcgccagcttcgccgcgtcgaccacctccgcctccgtcgcgccgtctttcccgtagaggatgttgtcgtagatggtcgtcgcgaacagcgccggctcttgctgcaccaggccgatgtgcttcctcagcgacttgagcttcaccttcctgatgtccttccctgcaaagaatcgcatcaaagccatacgagttcagaattcggattccgttcgggagatatgcagagcaattcattttggaagctgtgagatcgatacgtaccgtcgatcaagactttcccggcgatggggtcgtagaagcggaggatgagcgagagcacggtgctcttgccggagccgctcatgccgacgagcgccatgctcttgccggccttcatgaggaggtcgaggcccttgaacaccaccacctcgggccgcgccgggtaccggaactcgacgcccctcagctcgatcacgccctcgactctcttgacgtcgttgccggcgtcgatcaggacgtcggtcttcctgtccaggatctcgaacaccgacgacaccatctggttccccttgatgatgtccggcgccatcgccagcgtctcccccatggccagcgccgtcacgatcagcaccatgaatgacttcatcaccgacttgaagctggccatctccttgctcatcagctccgaaccatacctgaatcccgatcaaagctttcaaatcttactactgatacaaatttggactgaattattcaccgcgttccaaacttcgtgtagcactaaccataaagccaacgcgtaggaagagaagaggaagaactgggaaactccgtagaagagcccggcgccctggcctcgccggaatgactgcttcgctggctccttcagctcgtcggcgtagagctttatcaccttctcctcagcgcagaaggccgccaccgttcggatgttgctcactgcctccgcggccagcatgttggctttcagatacgacttgccaaggttgcccccgtagcctttcatgaacattttctgtcgcatcacaacacacagattgtgaatttgatcgagaatcagccaggatcatctgacgagattctgtgcttacctcgctgatgtggccgctgaccatgagggggtatgtggcgagaacgacgagagtgatccgccagttgatgatgaaggcgatgatgagcgacgtcacgatcatgccgatgttctgcagcaggatggtggagcggtcgacgacgatggtgcgcacgagcgtggcgtccgtctcgagccgcgacgacagcatcgagctcgtgtggctggtgtcgtcgaaccacccgatctcgttccggaggatggccgcgaacatcctctcccggacgcgcagcgtgagccgctcccccatgatgccgaagctgaggtgctcgatcgcgtggaacaccacggtgagcacggccccgcagcagaagagcaccgcgatcttgcgcacctcccgcttcgtggtctcccaccccatgtagtaggacacgagcgcctgtgtgacgccgagcgcgaacagcggcatctgcgagccggcgacgaaggcgctgacggtgcccgacacgccgaagaaccagtccggccgtatcatggagtagagcttcttcatcgacaccggcttgctcttgtgccctccttcgtcgtgcgcctccacggtgccgtaccggctaaccgagtccttctctgagcggaagctcccacccatgctcgtcctcgatagctccctcgaatacttggagctagcagcacgcaaaagccatggtcgttagctcgcggtggccggtcggaacttgacacgacgtcgtcacgttcacgttcacgtacacataccttagtggtcggctgaggctggcgctgtcggagaaagattgcttgttctggagctgagctgcttcctgcagctggatcagcgaggcgtaggcgctgcgagggttcgccatcagctgctcgtgcgtgccggtctcgacgatcctgccgctgtccacgacggcgatcgtgtcggcgttccggatggtggacagccggtgcgcgatcaccacggtggtgcggccgaccatgacgcggtccagcgcctcctgcacgctcttctcggactcggcgtcgagcgcgctcgtcgcctcgtcgaggagcagtatcgacgggttcttcagtatcgccctcgagatcgcgatccgctgcttctgtccgccggagagctgtatcccgcgctcgccgacctgcgtctcgtaccggtcggggaggtggttgatgaaggtgatcgcctccgacagcttcgccgcgtggttgatctcatccatgctggcgtcccccttgccgtagagtatgttctcccggatgctcgtggcgaacagcgcgggttcctggttgacgaggccaatctgctggcgcagccacttcacgtcgaggtccttgatgtcgtggccgtcgagcagtaccgcgcccgtgagaggctcgtagaaccgctcgatgagcgagaccacggtgctcttgccggagccactcccgccgacgagcgcgacgatcttgcccgccgggaagtccaggctgaacctgtcgaggatgacgacgtccggccgtgacgggtacgcgaaccgcacgtcgcggaactggatgtggccgtcgaccgacggcagcgtgcggccggccttggagctcgccttgttgacggtgttcctctcgatcatctggaagatcgggtacgccgctgtcctcgcccggaggaacgtcgatatgttgggcgccgcctgcccgagcgacctgcacgacacatattgcgaccaaattatgcacgggcgccatgggcgtgtgcattcgctgacacaaacacgccagggttgcagactcacaggccggcgatgacgacgttgagcatggtggtgaaggactcgccgccgttggagatgttcttgtggacgacgacgctggtgaaccagatgagcagcgcccaggagaggaagagcaccgagtgcatggagccgaggccgagacccttggcgaggccgcccctcttgccgtacttgtacgtcctcagcagcgcctcccggtacgtcctcactgccttctcctcgccgacgaacgcctgcaccgtccgcacgttgccgatcacctgcacaccacacctacggcggcgtcatcagtacgtgtacgtacgtcctcgtgctgggagaagtccattgagaggggcacgatcgatggacggacctcctcggcgatctcgccggccttgacgtaggacttgcggacgcgcgccatgaggccgatggtgacgtaggcgtagatgccgccggcgatggcgatgagcgggacgatggcgagggtgacgaggctgatctgccacacctgcgagaagccgatggcgaagccggccaggaaccggctgatgtagtgcatgaaattgcccacctgcacaagaacaacgcagctcgtcagcgccaagcacacacgtgacacgtgacagcgcactggatcgctcgtcccccttcggcccttcaagttccaagttccaacgcagcactgcgatttggaattctggaattgggcttactgggcttaagaaaaagggcctatattgggcctcgaggtatgtacggacgatacaggcaagagtagtcctgcagccttttcagagagctgggccgtccaaaccaggagtgagctaagcgacaccttttaaatggttagactacggagaaccgagcgttgctcggttggctagcgtcgccattgctcggttggctagcgtcgccaggtgagcgagtagcccgcgcgggtttgatcctgggatcgcaaatcgcgtgtctcaccaggggttttttccgtttccccggactgacttcgcttggtcccgactaggtatagggtacacgcgcgcgcgttcagtgggactgcatgtttcctcctagtgtgtgttagtgtgcgttagaaacgtgcacattcctagtgtgtgttagtgtgcgtcctgagttgtacccttctaaaaaaaaggttagactacgataaaaataataataattatggttaggatgcaacacacttgaacaatacggtatttttaagtatttatttttttaaaaaagatagtcaataaaactttaagtaatataaatataaatagtgtccattggcgagtactccctccatttctaaatatttgacgccgttgacttttttaaatatgtttgaccgttcgtcttattcaaaaaatttaagtaattattaattattttcttatcatttaattcattgttaaatatagttatatgtatacatatagttttatatattttacaaaagtttttgaataagacgaatggtcaaacatgtgctaaaaaatcaacggtgacaaatatttagaaacggagggagtaatttctttgtccaaaatatagaaaagcttttgaagtataatgttggagaccatgtaaaagctaatatcccttgtctttaagacggagggttctgggaacggaaggaataataatttttccagtggcagcaaccatcctccatctctccgtgtggggcaaccgtacatcgtgcaaatgttccaatagtattacaattgtacaaagaacaagcaagatgcttattgcgcaaataccccacctgcattactgtagaccaaactagaattcacatgttgagaccccagaaaatggttcgcagttcagttggcagttgggacgaaaagaaccatgcttgcaaagatggaaacaacttgttcctctccactggttcatttcagagaagtcgagatctacgacagtagcttagcctttccaatcaaacgatgtactcctccttcaatgatagcttaagaagggcgttttcagcattcttgtttagtgaatcgtaacaatcattttcacctattgctcaggaaattaagaggttggtactgattagcagcgaacagtacgccagtgaggatctggatgaattggaactggttaagtgtgccgtctacaaggcctttgtgtactcattttcatttagagtatatgatttaattagctcagacgataccagttacggtgatgacttagaattcaaacaaacactaggtgtagcatttgtgagagtataatgtttacgaattagctggctccattagctggagtggtcgcaaaaagttagtgttactgatagacaagtcaggcaacatagtatcagatcccttaaataaccacttggatgccatatgcaggttatgctctatccaaaaagacggtggctcaagacaatcatttattgcgtgttttatgccaatcctgtgagattattatcaccaaaactcatttttttttcaccgatacttcagggacagctactagaatatgcgacagctacttcaggggaaaaatactccccaagtgctagtactgttagtatatgtgaattagtagtagttacaaacagcactttaaatgtaggatgaggcacagtatagatagtactactgttttctttaaatttcatcttgttttcgacaggaacatttgaaccaacatcgtttacaactggcacaaaaatgaaccagagtacacacactggtggagaaaccatctttggtcggtcgcccgaaatccacaatagtctcggttccactaaaaaccgggactaaagatgatctttagtcccggttggtggctacagcgggcatatttgatctttagtctcggttggtgttaccaaccgggactaaaaatgatctttagtcccggttctaaatctgttaggccttgtcaggccccccgatatctttagtcccggttgataacaccaaccgggactaaagataggatctttagtcccggttggtgttaccaaccgggactaaagatcccagggatctttactcccggttgataatatcaaccgggaataaagcgtacgcaccagcccacgcacaagcgcatgcgtagcccctctctctctctatctcccatccttatctctttttcttctccttccttatctccatcctctccccttcctcttctctcaccccctctcctcctcccctccccctcttcctcttgcagaggcagccgacggcggcgggatgggggacgggcgcgggctggcggcggccggccggcggtggcgggatggaggcggccgggcgcgggctggcggcggccaggcgcgggctggggctggcggcggccggccggcggtggcgggattgcggccgggcgcgggccagcgggatggaggacgggcggcggcggcccggcgtgggccggcgggatggaggccggtcgccggcggcctcgccctcccctcccccagatccggccggaggggaagcggcgagatgggtggctggccggcggcgggatgggaggccggcaggtgagtcgatttttttttgattttttttaatttgtggtttggatgttttgatctgtgaataaatctatgaatcgatattgtgaatgaatctgtgatgttgtgaatgagtatgtgactcgatgttgtcaatgaacctttgaatcaatattgtgaatatatttgtgatgttatgaatgaatatgtgaatggatattgtgaatgaatttgtggtgaatctgtgaatcgtgctgtggagttgtgatgtggatttggggtttgatttgatgatatgcataccactcgattcgtgagaaaataaaaaagaaaaaaggactagctgatggactgccgctaccctctctttagtcccggttgataacaccaaccgggactaaatctttagtcccggttggtgtcatcaaccgggactaaagatcgatctttagtcccggttttttcacccgggactaaagatagcgatctttagtcccggattggtagtcccggtttgaaaaccgggactgtaggggggttacgaaccgggactaaaaaacacttctccaccagtgacataaagctgctacagttgggtggatatcaggatatgcaattcatttcatgggaatttaagaggatttttatgggaaatgaactacttcatgtgacagtcctataaaaattgcccaacatttttacaggattttaataggaattggttcgattctcattaaaatggagaatcctccattcgataacaggcctaagataatttataatattcatcattttcgtttttttctctccttagatcataacacgagaagatcaatgtacataaccacatgccattcatgcttaccggccattagttctggtagatattcagtaccattatgaatttatgattggcttgagaaagaaaatcacaccaaggtctttcaaaaaacaaaatcatcgacgaagctgccccctttgtgctgaagacccggagacacgccatcatcttttcatcagttgtagctacacaagacaggtctggaagaggacccagccgtgcctgtatatctcctgctgccagatgccatggaggagctaaccgaaaagataaatccgagcggtcccaaaaataataattttatttgaagacagagttttatgttggtcaatttaacgatattgaaatgataagaaattagctaatctaggaagattatctttacgtctactagttggctttattttttatatagagaagagtattttttacgcagcttttacatccaattgaaacttagccatcaaataaccgatctgaaatttggttctatagagatttaaactcaggaccacaaacaagaaacttagcccttaaataaaccaatatgaaattcactcttacgaagatttgaactcatgaccttaggtgctacttaggtcactacaatacctaggctagatgccctttcacactagttggtttcatacttgatatttaatactatcacatgagcagcgggatgctatgtgcatgttggagatgtaaactatttttattattaaggaaaaaaatcactcgtgtgtttggaaggagaggaatgcacgagcatgctatggcattatggcagagtggtgggcatgcatggcgagcggctgaatttggaggtgtcgtcatcaaatagattcaaagatcatgggtagcgaggtggtaggttatgggccatgagctgcccagctttatagcagaattttgatcggcttgtcctggttggatcgctcagaaatctaactaccaacaatcacatttgttgtaaaatattctaatttctcttttttcttaataaaatttgttgaagaaaatgtatcacatacgtggatcatttgactacatacatcccgccttactagaaacagtcacatcctacaaatctcctatatataaattgcttagatgtctatttcttccatctcattaaaaaatcaatctagtaccgaatgtgacgtattctaatacgacggattctatctatctatatatatatatatatatatatatatatatatatatataatactaagaagtgtcatatctgatattagattaggattttatatgatagaaggagacatatttagatttgtcatactagaatgtatcatatttgctactccctccgtcccataatataagggattttaagtttttgtttacactgtttgaccactcgtcttattcaaaaaagtttggaattattattttatttatttttgacttactttattatccaaagtactttaagcacaactttttattttttatatttacacaattttttttttaataagacgagtggtcaaacagtgaaagcaaaaacttaaaatctcttatattatgggacggagggagtaggttgtttttttatatggaatggaagaagtaatatggcaaattactgcagacactacacgtaccaaattaccaatcactccgcgtctccgccactccggagtcctggcttctgaacggcagagttggcaaaggcagaggatcactctcccctgcactgaactcaaatggagaaaacgtaaaagactggacaaatgtacgggatcccattgggtggattcgagtggttgttggattgatgtgcatcccaattgatagagatgaattcaacggagttaactcgaatcaatcagcgagtactcatatctactcctagtactgtttcgcagttactacagagttgagtggatgagcgcatccaggccagatcgagaggcgaagactgtgaacgatctactactgcccgcaacgccttcaatgcccctcaccaaccctaataacttcccggcgccgccccgccctatctactcacccgaccgtcctacgtttgcttccctgtctaccggccgtcgttaatcctctcctctccgatcgcttctcagtttgggattttctttttcccctttcgcttcacgtgaacggccggcacggcgtcgcgtgcgtacgcgatgccgcggcgagaaaaaaagcaacgcgcgcgggttgcatgtttgttacacgcgcgtggcgtgtgcatggtgatgttatgttacgcgggggtgagtagaagtgtgtgtaccttctcggagatggcgtcctggacgacgaggatgtcgctggtgatggcgttgatgacctcgccggtggaggcctcggtgtcgaagacggcaatgtcctggtccagcatcgaccggaggtacgcctggcgcatcttcgccgcctgccgctcccccgtgtgcatccagcacgccacctctgcacgcacacgagagccaccaatcaaccaaccaccgcgcgcattgcatcgctcgcgtctcgaaatctacgcatgcatcagggctcaccggtccacgacgagaagagtatgacgatgccgaggtacacgaagtccagcgagtactgcatgcacggggagacaaggtgagcaagcaaacagagtgtgacatgcacggtgcagtgcatgctcaatgggtggatcgggatgtgttactagctagtgtaccttggcgacgcggccggagacggtggtggggaagaggtaggcgaggccgatgatgttgatgagcttgccgaagaagatgaagaagacggggacggaggcgccgtgcgcgcacgcgcccagcgaccccaccgccatcagcacgtagtcccaccggtcggcgaacgagaacagcttcaggaacggcaccttctccaccttcgccgccgcctccttctctccctgctccgccttcttctcgccgccgccgctctgccgatgctcctgcacgccatgcaccggcgagctcatcttctccgactcgctaccaacaagatcgcgtgtgcgggtgagccaagacgctgtgtggcgcctgcgtggggggaggtggtggccggccgcgcgcgagctgaggctttaaagactaggagtacacagtggtacagctcctccagttcacttcactcgctgtcgtcgctggaatggtggcggccgtaatttagcccgcgttttagccgtggcagcagcgagcaaccggccgcgtcgcgtggtggtagtggtagagaaagcaaactgagactcatcgacgggtggggttggttggagtagatggttaatgtggtgcgcgaggtttgactcgccttgtgctggctactggctagctcaggccctcgcagtaatgggtgctgagcaagttagtgctgcagtaaagagcgtttgtccaaatgctgttgttggatttgactcgaaaaatcaatgctttggcaaatccccaaaaattaactgccgtgagtttacctgtgggatcctagtactgaatgaatggctgaacagttaatattagcggaattgttaaatcacattcgacattgattcttaggagttcatttttttttcagattactgatcttagtatttgctttacaattcgtgccctatgatcccgacaaacgacattagagttacgatctagggtgcggggaggagattactatgcttacagatctggccaggagatacgatggcttgacagtggatggtggagatggacaaaagacgaggcactagagccacagggaagaaggagggcggtgggctagcgttgacggtaaagggcaagtgagcttgtggttaattacgggtacgaacaactgcatatggctgggcggtgtgtggcacggggtggcgcccgacaggggcggtgtaggcggcgctcctttggtgaataaggacggccggatgcaggcggcgagaggtgacatcggcgctagcaacacgtgaggagaggggagtgactggcgccggcaacatgagaggagaggagaggtgacgccggcgctagcagaaaggggaagtgcggcagcggcggcggccctagcagcggcgcactcggaagtgcggatacaacagaaaggggatcgagagcagcagagagagatgcggtgtggatgcggtgaggagtttagggttttctctcctcagccgccggaggagttgggcttgggccttggctgttgtctgttgggctgggtctttactctagtctctaggagtcctagctcgttaaggctcgcaagcagctcgcgagctagctagctcgttatctctaacgagcttaaaagtcagctcggcctgttacgaaatttaaatgagccgagtcgagcgagctaacgagccatgagttttatgtccacctctaattgttagtacctctttgatttggtcaagagtagcggtgtagtcgagagcaaaattggcttgacacacaaatctgcggctatgcagttgttcgtacccatataccgtactgttataggtcacttctattgaaaaaaaacaaattgttagagtcagagatcacggccctttattccccactttcaacatgtctctccaacgcaacacaccaaagctcgtgtatgattttaccctgtagtaagatgaccaaaaggaatgaagaggtatctaggcgagatataatgatacatgtcaacggtttaggtcacgactatagtatttgcatggtatggggatcgtcggtaccagggaatatgcgagattaaggtaaaagagacaaagacaaggattttatacaggttcgagccccttatcggacatgtaatagccctactcctgttggccgaattcggtgttgctcctgttggacaagtacaatatttgggataacttatctagctgtcgtcgacttggtggcatagataaccaacacgtagtcaacgacatggtagtctttctcctcgagtacgaactcatcgagatcagaaatggcgctaaatccctcttgtcggcctccgcatgcaccatacagggtctgtctacttgtctaggcttatccctgatgttaatgtctagcggcgtgtgttggcttgtgtattgtgtgtcaatctgttgttgtgtcttgttggtctctccccctcctcctagggggtcttgtatttataccaatagatatcctcttgttcaattaaaactagagagaccaatatggatacaattcgagtagtacttgtcgtttccatatagaactctacttatcattccttatccggaactctttctatatacgagatatgattccgtataagacttaatatatggttgggcctgtcgtgcttagtcatctactattaggtatatggtatctataaccatgataatactacttggttaatccagggtgggatcagtttttgcatcacaaagccataaataatctaacatcagtacgtgggacattcttgcaaactgaaatggctggttgcagagttgcagttcgcaaacttcaaccttatcaggcgggctaaaactaaactgaatacgtacttaccctactcaacagtctatcgtatacacacatgtgaaatgcctcacatgccatggtctgtctacaagcagaagcagggcaacgccaaggaggcttttattttcacttgatctgacaccggagcagattcgtcttgtacttaatgatatgtaccgatgcgaggccttaaatggccacaagggaaaaagggggtgatttaaatgtggaaggaaaatgcagttgaggacgggatagatgggaggaggatcatggcctgatgcgatcagataattgccgaggtggacacttgtgccgcgcgcagcaaaagaatgccaagatgctgggacttttgctgagagcagcaagaataccaacatgctgatgactgatgagaaattgagaatgctttggttgctttgcttttcccatcgctgtggcgacggacacgcaattgatggtgaattgacgacaataatgtgtcgtttttgcccttgatttttttttgtcttccgttttttattttgtttagttcacatcaaaattaaaagtttgattaaaattgaaatgatacgacgtaaaaattaaaagtttgtacgtgatatgatagaaaagttggaagtttaaagataaacacggtgatgcgcgtagtgtgccaattcaggatgcgcaactaccgttgggattggtggttgcagaaaggcatactagtacttgcttctcaccgaagtacactgcccgtctgcattgcaagtttgcaacttcgcaagacaggcacagcgccggaaactgtaggcatattaagagaaaagaatatgtgtacggccatgtttccacgtcaaaataaataagaatacagcttgatgctcgtcaactttaagtatatagctgagtaaatgtgcatcagccaattgcatcctgcagaccagatacagattcttctgctgaagagaggaaaggccagggaaggaagagaacgagaaggtgatgattcttttttaatagaacgatggatttctgtgccaaaagcatactggaagttggaagcagcatttgctactaaggcccaggatcagtatgaagcccagcccatgtaatgacatggcagccagtaaaaggccggctcctcggtgttttgtttaggaataagtccatttaacctccctcatcttgtgcttgtctgaataacatcctccaaccggaaaaccggatatattacctcccccaagtgttaaaaccagtacaaaacaactccctcggtggtttttgacggtggttttgctgacgtggcagcctagtcatcgaaaaaaaattaaaatattacgtgagggcccacatgtaagtgtcatttctattcttcctcctccactctcctctctcctctcccttctctctccctggacagggcacggccaggggaggtgccgaagcgcgcgagagggatggggaccgccggaggatgcgggcgcgtgccgcgaggaaggggctcgccggccgcggcgcccgcggggagggttcgcttgccacggcaagcgcggggggcacggttcgccgggatgggtcgtcgaatcgccgccactgccgtcgccgccgacgagttggctcctctcgtcgccgttggtccaaagggaggagacggagacctcgctccccttgtcgaaatcggcggagctcaacctgggcattgctattgctgcctttggctccacctcccggatcggcaagacaacacagcggctgcgcaaatccggcagctcagcggcggtctccgccgcgggaggccgtggtagtggccagcggggtgacgagaggatctagtaggcaccggtgtctcgacatcggtggctgcaacgggagtcgtggtgggagacggcgaggcggtgatagtggccatcgtcgggcggcggcgcccgggtgtaggatcaaggaggccgactagagggggggtgaataggcggttttaaaacttagtggcacttaaacaaaactaacctaagttgctaggcaaggtaaggtgcaaggttaactaagcaactaagttaagttttgcaaacctaggtgatatgggctcaaatatgtctctatgaatgtaaatagaacaaatataaatacaacaaataaatgagacaagagacaaggaatttttcaccgaggttcgaaaacttgccggtttcctaatccccgttgaggcgagcccaactccaccgctcaaccacgaagccaccgcacgcccccttcgtcaaggggtgggcaaggcgggagctggtgtcacgcccagaaatttaacccaaatttccagactattttgcgtattaaatccctgtccaggaccagccagggtacacaaaacgacaagtaatatacagttccaaacgtaaataaagcgtaaagtacttacggaagaggcacttagtcctcacaccgaaacagaacgacagcagaggaaaaaggtgatcctagcggggcttcagctccactccacaggcaaaactcaactggggtctgagccttggtcctctaactccatcttcagctcagaagcactacacttctgaaaagggggaataatagcaagactgagtacaaccaccgtactcagcaagccacaccaacgatgcagatgtgcaaggggatacaaggatggtttgtggctatttgcataaaggcggttgtaaaatattttattgagcaaaacagtaaaactgttgagtaattaaagtaacattaaatctccactgatcaacgctacaccacgttgaacaggcccaaccaacccacctgaactacagtgtattgggtcgatttattaagatgggactaatcacggtgaatctggtcgaccgcccataaccgcgggcacggctattcgaatagctttactctgatcagaggtgtacaactgtacccacaagacacagccccacgacacgtttccgtgcgccgacatgccaccatgacataccggaaagaggtcgtgacaggacccttcgcataaccccctctagccaagcacaccacacctcaggtttcacccccgtccccagcgggcaacgggcagtcccctctcgtgcctaggtgaatccggaagcgacagaggccgtcgcagggcccgccccgctccatcacgcccacccttgcctggatgcgtcgactagaggaaagctacactacaagcccagccgttgcccacgctggcttatggtaagtacgataagttcttccagggcatcccacgaaccggttcttaactgccatgggtgcgaccagcaaaaccatgcacccacagcccaccattcaatcgcattttagttggataattacgaccatgaagcatggccagatgtctcgagcacgcagctcaacaagatactagaatgtctaatactgcaattatcccatcgactgagctagtggtaattaagcatggctaagcatatagttctagctaggtcatcaaagtaacacaagctaggcgatttattacccatggttgacaaaggacatatatcaagtaaacatggcacaagcgagtagataggtaaaaccctgaccccatgtaattagcaaaacatgcatatttatttgcaaacagtaaaacatttgtaaattgggatcaacatgctcaaggggaatgtgtgacttgccttgcttcttcacttggattttctgaactcttttcctcgcgaccgcgatcttccgaaacgacggattctatacgctggcacgcaaaacgaggaaaaacctaataaaaacgaaggaaacagtacctaaaaaataaacaaacatgtagaactcaattttagatgaattttgcaatttgaatggcccaatttggagttcgaatgaattagatatgaattttagaagttttgagccactaaatgaatttctataattattaatgatttattgcgcaattattaaatattttcacaaatgaaaaggactgccgctgacgtcagcaagagagggggccggcgccgacaggcggggcccgtatgtcagcgagacgaggtggcggtccaccgtggaccgggaccacaaggacggtccaccgccggtccacgggttggacggcctagatcggccaaggccgatcggacggctggggacggccgggcggcgcgcagacggccagacaaccggcggcggcggcggcgcaacgcggcgctggcacgggaggtggccggcgaagaggaaaaggaggagggaggcggctcaccgagaggcgcggcgacggagggagcggccgcggaaggaggcggcggcgctccacggggtgaagacgacggcggcgattcggcggtctccaatgaaggtgaaggagcggccggggtatgggggaacgcggcgaacgcagtagaggcggtggtgtggcgcgaggtggcaaggaacagcggtaagaggcggccgaaggcggcaaacgcggcgacgtcctcggcttcgcggtggagatggtgttgctgcggtggaacgggaaaacgaagcagaggccggggtgctacgcgatgcggcgaagccgacggtggcggtggcgtggcttggtggtggctagggcggcggtggcgcgctgccggagtcggcaaagtggcggtggagctcgggttcacggtggaatcggtgcccgggtggtttattgcggaagcggagcggtggacgggatgcgacaaagcgcggcgaggccggcgatgcaagcggcgcggcacggggacggcggtagcggcggcagcggccggctggagtccgccggcgagcggcggcgcttgggctcacggggaggagggggttccgggcatgggggagcttgggagagaggggaaaacggaggaggggagcacgagggtgctttatatagggctcagggatggagatcgtggccgggagaggtgggatcggccggtgacgtggggaggtgaagtggagctcgtggggaggtcaaaccggcgccgtttcttgcggggtgagtgggggaaaaggtggaggacgtggacggggtcgtgtccacgtggttggatgcgagctcgggtgcgggagggcgccggattttgcggcgacgtgggcggcaatggcggttggggttggccggcgagaggtaggaggaggagctgacaggtgggaccgccagtcccacctgtcggccggatggagagagaggagggaaaccgggggacgtaaagtagactttcgcaaggcgcgggccggccgagagagagaggaggcgcgcggcctgcgggagaggaggggaaggcttgggtcaagcccaaaagggaaggatggagaattaaatttgttttctttttatttaattggttaaatgatctttgtgactttaaaattatttcttgagctccgaaaatttgcggaaaaatccggagagtattttagggcacaaagaatattacaaaatattctcggccaatgatttttaaaggaaattttaatttcctctataatttcacttgattaaattgatttaacttttaatataatttcttgaaatgcattattaattgatttttaatcccgaacgaaaatcggggcgttacagctagcccacggagaagactacccaagcctcgatcactcggggtagttcttccttcactccgaaggtggtgaactccaaaccactcacaaacggcgccgggcctcctccacaatctcctcggagaggtcaccgggcaacacctacacaagccgtctaggaggcggcaacctccaagatgaataagtctaggatgcttgccgaggatgatcaagtgccacactagctataacaatgaagcaatgcacttggattggcttaactcactctctaacactagataaactaagtgcacaagggtgtgagagctcttgcaagggttcaagataatgcaatggagtgccaaaaccttacccttgttgctggggagtgggtatatatacccccaaccaccaaaactagccgttggaaccgaaatccccaactttgtgctctgccggtcagaccgccgttgtgaggccggtcagaccggactactttgtaacggctagggcaatcattgagcccactcaacctggccggtctgaccgcagtgtagtggccggtcagaccatccacggctcggtctgaccggttgcggctctggcggctctgtatcgccaccaaaaaccagaccagtgcaacagaccagtggggccggtcagaccggctaacaggcccggtcagaccggcctaaggcccacggtcagaccgcaggtcacttttcagctcaaccgaccgttagtaaaacgacgatatctcttgactcgggtctcggaatttggcgttcttggactttatggaaagattattcaaagggctatccaacccatgaacaatccatccaagaaacacaacttttcttagggagaaagggctcacactccaaaggatactccacaggacataaccacatgaggctacccaaacctataggatttgcccacatctctctttgtttaggacttgagaaaactcaccacacttggctagacaagcccaccaaatacacctacatacatatgaactaatatggcacatgatcatccacaagctcgcttcatagacccctcttgatagtacggcgtctatctagcaaatccggtctacaccaaacaccaagaccgggaaaagactaagaaaacattcttagctacattatacctttgccttgcgccatccatcttggggtcaagtttgagtcgagatcaacacttgtgaccatttgattcaaccatgtttataccaaggtatttaccatcatttgtcaagactttcttctcatcacaagcttgatttcattcttgccaacatggcgatgtccttggcttggtgaccattaacccatggtgtcatccattagcctcatcatagtgggacctattccttttcacatctcaaaggagaacattagtctcaacaaatcggttgtcatccttcacttgatgaccaaccggttgcatatgaaagatatggatatgtttgttgagtattcattaacatcacaagtgtcatatactcgtatgcaagctcaagtgcaaagatccgatataaataataggtgaacaacatggatctaaaacatgcacaataaatgtataggatttgctccccctaagtatatgcatacaaagaaatataaaagagagacaagtgtatgcataagtaaagaagaaccaatggggtttatcctatacacatagagaaggcatatgtagtaatgatgaagataaacaaaaaaacacataccttcatgatctccatgttctcaatgtaaaggagactaaataagataagactcaagtaaacattagtctcactcttatataacaataacattgaaatcatatatatgaacctatcaaaaagtaggagataagaagtgatatatatcgctttatctccatgaatttcatccttgtcatgattaaggtccatcaccaaagaatgcatatctaccacatctcattatcgggaaataaccttgttgaaaacttatgtaaaagagaggttaatcccataaacatcggtttatcatctatcaccaaagtaacaattacacaaattgtttaatccaagatctttcaatattttctctcttttgtgatagataataatccgatataaacaatacaaagagatgagatgaaagataatttcaaatcaaggtagagatcttataatgaacaaaatatagaataagctccccctcaagatgtgtatacatatggatatgaaggaatgcatatgcacataatcaatcaagatcaatgaggaagctcacactatattttggatctacaagatagaccaagttagaatatgtgaagtttaatacatacctcctatcatttttactttcatatccaaataagactagtcaaagaaagactcataaaaatgttagtctcatataattagatttgttattaatcatcgaaaccaaattaaggcacttgaacttacaccgggcttgttgaggaaaggggaaggggcggcgtcaccacaggacccgcgtgcagccggccgacaatctcctccccacacgcgtcgtggccggctgacgagctcctccttccatgccagcaaggttgtcggcaacgtcgctaccgagcagcagcagccgtcacggctgtcctgccgttcccgccgagctcccgccgctcttccgagatcctgccaccccgccactctcgccgtcctgccgctcccgctgagctcccgctaccccgcctgtcccgccgctcccgccgagctcccgccgccccgccgctcccgctgttctatcgctctcgtcgagctcccgccgctctgtgatcccgccgatgttcctacgcgttgccccgccatcctgctgccgccgagctctctccatctcgctcgccgccgagttcatttatttttattgttttactcactgacatgtgggtcctatttaggtttgttttattttagtgccacgtaagcgccacgtcgatgccacatgggaagtcaaccgccacgtaagtgccacgtaggacaaaaccgcctccgaaaccaccgagagaggtgatttgctctggtttttagagaagaaggaggcgttatacccggttttccggctgagggatgttattcacgcaagcgcaagagatgagagaggtaaaatggacttattccttttgtttatctgagatgaatttcagtgagtgagaaccataacgcacatgacaatcgtagaaacaactcaaatactcaatttgacaatttgttccactatggtgaaaaaaatcagcacggtgatttggtaattagagatcaaacagccggaagctttaactcataacaagacaaacgcactgtccttgtacctcacctgaccttctgacggacgaatggccgaatgatcttataactgtactccctccttccgggaaggagatcctttgacgtagaggcttctatgtcagagggacgtctaactccggatcgccattcgtagcgcatccgacattccagaagtgcaacgtacagctataacatgctcggcttctacccattcacaaccgccggaggtccggcggcgccggggaagtccagccgccaaagccgccgctcgacctgtgttcatctctcgctggtggagggcgtcagtgtcgatgtcacccgcatggccgcgtgcggggggggggggggggggggggacacggtggcggtgccaccgcaggcaagggcgaactggattccagagatggagaatgttgcaggtttgatcgagcttcgaattggttggcaatgttgtgtatgtgcaactgtgcgtacctaggggactccgtggctcttgtgcaaaagatgagacttttttttatcagggagctcgacggcagggacgaagcaggcgtggaggactggagggtgctctcgtccaccgcatgcgtgggtcgcgcatgcatctcacttggcggcacgcttggacatgaagcaggacagcgaggctgaagtgttgcgcgccgtgtgtgctgctgcccttcgacctcgcggtggtggtgttgctgccgtcgattcattcccctaccgtgtagctcgttgtcgatgacgactacgggaactccagtttcttgctgaccacgatgaaaagcgacgagtgtggcgcggttgtccaacctcgcaggcggcatccacaagcaccgaggtaggcggaaacatcgcccctgccctcgccggtcgcggcggcggcggctgtgaatggaccgaattgagtagcatactcattgggcttgtaggctgataatggagattggagaacggactgaaacgatttctcccatcagatgtgctacgaacaatgatccagagttggacatcctttgacatagaagcctccacgtcagtggatcttgtacccttcgttacaaagtgaaacaaaaaaaatcctaactataaacttaaacatagctttatagttgatttattttgagatggattcgtagctagtggttgatttattttgagatagagtgtgtagtagtacaagattatgtattgtcttgctccatttaagcatttcataacctgacaagtgctctatggactagcatttcatttaatcaaaatcgggtatgggaactcgtatggtgcatttaagctgctatagtgttatgaactttagtactccctccgtttcgaaatgtttgacactgttgactttttagcacatgtttaaccgttcgtcttattccaaaacttttgtgaaatatgtaaaattatatgcctacataaaaatatatttaataatgaatcaaatgataggaaaagaattaataattacttaaattttttgaataagacgaacggtcaaacatgtgctaaaaagtcaacggcgtcaaacatttcgaaacggagggagtactatgatactacaagccctttatttcagagatgacaagttgttcatgttcctagcatttttctttgcagaaagtcaaaacaggaggtgtgcatggcatcatttcagcaatgacaagttgtatatatttttccaatcaacctactacgggatcacagatgacaggttgaacaaaaaatggaaccttaagattatcaactaaaatgttttatttctcgaactagcaagtgagaatgcataggaagaattaaatataatttcaataactaaaataaaggcacccaagtccaaagtcaaaaagaactcgaaacctcaatggtgggggtgcatacccacacatcccaccggcggaggtagaatcagttcctcacttctcaaacaagcaagatgggcacttgatttttcctgtcactacttatctcatgattatcttaggtggacttatctgcttttgtagatgagcttgtttcatgctcaagtatgttggtagcgtcatggaattccatatggagcgcatgaaattagtatgtacaagaactctattatcttattagagaccctttaaacatgacaataccactaattgatggtactccatgaatcatacaagcttacatacaacagtttgtttgatacatgaatggcttttacagcatatctaagaatccttttatattgatcaaatgggccaacaattaacgtaaatgataatctcatcctaatatatgccatagaaaatccagcaagtctgcataaagtactgcatgctttcctcaatttcattgaggaaatttattaatatatccaactaatataaaacttagtatcagtctccaacaaatacaaaaaagtatatctaaaggtgaagctaaatggaattataagtataccaagctaaatggagctcgccgataaatgaaaatgcttatcaactctataaatagttagaattagccagaataagaccggaagaacctcatggatggtaggcaagtcacttcttccaggactacatcacgaggcttcataaattgacagaacagaatcatctcatcatccagtagcagaaaactggatgtcagcatctcgggaggcctttctgagcttcaataccctgcgcctgaactttgcctgctcaaggccatccatcgaaggcacaatagtcatcatctctaacattggtgtgttcttgagcagaagcttaacaagatccaatccactcttgctctcatcgatgtacaccatcctaactgccctgagatgcctcagcacgacccctttacctcccataacccaatggtttgctccatcatcgctaccccatctccgcttgcattgcgatggctgcaagaattagcaaccacaccatcagcattgctaccatgttttgcagaaaaaaaaaatctagaacagcgaaagaattatatctcaccacaacagacacagagagttcttccacattctgacaatttgcgagcaatggggcaatggatgaagcaccttcttctctcctctctattatacatgacaactgcctcactttgtttagccgcaccttggaccactcctcaggacgtgcaaattgcttcaagttattcacatatcaataattagattcctcaaaaaaaaaaactttttcaccagatcaagattcaagagtatgtcatatacctcaatgcaccaaggtgaaagcataaggctctgtacattcccaaccaaagaaagaagctctctgagattaggctcctggagcttgacctgcggcttcttgatggcaagaacgacctcttctaatgaatcgacattgtctataatgtgtctggttgccattgcacccaagtagtggagggtgcgcaacgctggcatgtcagagaaggcaacagaagactgcggagtccaagaacaatccgtgatggcaagcgagcaaagctgcgttgtgccggctaggcagagtgcaccaatgcggcattgttcaaggatcaggtagcggagctgtttgcagtgcgagaagaggtctgcaaagaagtcgtcgccggcaagcggaatggaggcgaggtggaggcgggacaagcgggtgagcgagcagagggacggaagagggtgggcgtagtggtcgaggcgaagggtcaaggatgtgaggttggtgcaggcgattagggaaggcgggaggagggcgaggcgggagcgggggaggtgcagctccaactgctcgaccccgcgcgcggcggcggcggcgagccaggaggcgaggtggtcggcggcggaggcggcgaaggcctggtcgaagaggccgtcgaggccgaggcggaggcggcggagcgggtggtgcggcctcgagagcgcggccgtggcggcggccgcgaatgccgccctgcggcgcggcgcggccgggaacgccgcggcgaagtcgaggtccagcgccggcgcggccgccgcgacgccgcgccaccggcgggagatggccgacgcggcgaccgccgacctgaagggcagcttggacacgatcagcccgagcaccgcctcggggaactgctcgaacgggtcgccacctccacctccatctcccccgtccccgccgccgccgccggtggtggcgtacgcgcgggcgtaggtgtagccggcggcgtggtggggtatcaggtgcttggtgcgcatggctgatctcccaaaccccccggccgcctccgggccggctcttcgccccgcgattcgcaggaaggtgtacttttttttttctccccctggaatcggaagcccacgcgcccacgcgacgcgacgctggcggcgagaaggaaaagtacagcgcaaacaggggaaaggaaccgaaagcgcaggcacgcaggccgcagccgacccgcggttttgatggctcctttccgcgggtgcgaatcgcgaggcggccgccgcgtgcctcgttaacccgcgataccgtgggcgtgggcgcgtggcccctgcagctgccgtcaccgccgtgccgtggagacgactcggcgaggaggacggtgccccgcgcggtcgcatgaacgagcagatgggttgtgaacgagtagatgggtttttggctcgatcggccctgtgtgccgcgcgaggccgagtggagcgggggtggtgcggtgcgcgcggtggggttttttggctccgcgtggtgggtttgccgctcgctgcaggcttttccgtgtcgtgagtcgtgagtcgtgacgagcgtggccgcttggggagtttgccaagtggttttggtgacatctggggccttttggcggacttgggggtcggtcgcgctgcccacgtttggttctgacgtgggttttggttcggtttctggtttggacttctggggcggacaagtggatcgcgaaccgaacttctctgtacgagagggaatccctttgccttcaatgatcagtaatcccttccctccgtttttactccatggcagggcaggtgatgaaacagtagagcatcccattgtccatggaccacggcagtcgtacgaaagattggagaaatcgtgcagttgatctggcgtcagagagcagaaagtgcgcttgtctattgttgtagtaattgcctgacatattagcctgctgtagtaacgctgcaagatcattccgtattgaaatactcttttatctctccgtcccaaaataaagtaaatataagtaggaaaaatatgtggaagccataaaataagtgaaaacatgtgaaaatcatatctcaaagttctctaaatttatatatagaaaaactagaacatatataggcatgaaatatattcataccaaatctcaaatctaaactaaatttcatttgagagaataaaaaaagacaaattacaggtgaattcacctaacatttttgttattttttttactcacaaataaagataagtttagacaactctattatcagatgagatactccctccatcccagtatatttgacgttttacttcatgtccattgtcctacaatgcttgacgttttagcaaggagcataaatgtggggccgcatagcagctgacggagcgtggggctcctcaccgggagaccgcgcgggcccccctttgcctgttcggccgggggcgctaggtgaggttctaagcactcgatctgtggaatgtttcgcgagagagcaaatgcgcaagacacgggcgatgtagacaggttcgggccgctgagaagcgtaataccctactcctgtgttctggtggatctgtgtatgaaggagttacaaagagctggagagcaagagagttcaaactctagaaaccctcttcctctttctctcctctacgagctcaggtcttctcccccctctttcccccgctccccctttcttaagtgggcaaggtcctccttttatatctcaaggggatctcacatgcaccacttctacctactcttcttttgggtggggactcaccctatcttcccaaaaaagaaaaaactggcttgcgccttcgcctggaagctaaatcacagcttgtctttgagtgaggcccagcgtcatcactcgcctgacaccggggatctccctgttactccctcattaatgggcggagatttgccatggctgttgtccgaatgaccctctgatgggatgggccatacctacctccactccgccggaagcaggcgcaacgtgggagcacggttgtctgccgatgacgtgaccggcgtcagaccagtcacaaaccggtcattcttgtctaccacgcgtcagtttagcatgccacacgtcagccattcttcataaaatgacttccttgtaatggttgcgatgaagcctggtatgaatctagccgggactgacgtgctaactccaggagtcagcacgccggctccggctagggacgagtgcctagaggctctcatcattccgacgggacggggcgaggcgtgcgaaaggccgcctgttgccacctaacccgcgatctgaccggtctgtgaccggtcacacactgtgacctgtcacggaccgaacgagtgtgctgcgctgcattaaatgcggcatggggcgctcgtccaacccgcaataaacgcggttaggtgagcgccgctgtgctcacctaacccacacacgtggcgccaaacccacagggggtcggggcgccccagccctcggggccgaaacgggagcggcccgacccctcggggagacagagggaggggcggccacatcaccctcgggcccgacccccccgagggggtcaggccacgtgggtgactgcagctgcctcaaacctctagtcaagatacccccggtcccatatcaccgacagcagcgtacaattcaaattttactaaccgggttatcaagaacaacagctcatccatgattccaccgtggcaggaacggcatgtgtattcttggtttgaaatgactgctcatcatggttattcaaagtacctagtactccagttagggctatatagtaattttcacctaagctagaacgccccaggccgagtttagttccaatcttcttcttcaaactttcaacttttccatcacatcaaaactttcctatacacaaactttcaactttttcgtcgcatcgttacaatttcaaccaaacttccaattttggcgttaactaaacacaccctgggacaaagggagtacaaacatagtactagtacttcactcttgacagggagtactgatcttgccagtttctcacctgcctccttggctccttccgttttgaatccttgttcagtcagatcttgtgttctggctctgaatcatgtaatcagtaccatgcaaacaatgcaaatgaaagcaagcaacagctcctattgaacactgcaaaccagtagaactgatgtgctttgcatggtatacagaaagatccacttggtacatcagtttaacgatcaactaaacagtactacatgaatgaatgaggctatcaaacgttacaagaagcaggtgacatttatttctctcctttcagttttcctctctttacaaatgaatgtgactatgactatcgagaaattatgtacctggtttgctaacttatcagatacaacaacgtagcaagctacggtttttaaacaaactgaggtttccacaaaaacaagagaaaacaacatcccagctgcacctaaagttagacatgacatctcgtatcatcaccaccaatgatcctcttgttattctgagataccaagagagtggtcgattccttgcacctggaccatctgggtgtacttctctcctctttgttccagaacctggcaaccaccatcttcaggaaagccctgaagtcaacaacaaatgaagttatgacctccctgcacaagattgatacgtgttattatttattgatagcacgagtgtaccatcattttggcagcatgataatgttatcagaaccctgggataatttggccatagtaagaactaaaaatacatcaattgaattcttctggattggtcataaggtctataagttcaattcctctcaacacccaacaaaagatattaaatttaaacatctttgataaagtcgcaacacacaataacaagaaaatattactgcccaccaaactaaggacctaaacattgcctcagccattcaatgatcttgttttatgtctaatagtaagttaggccaagtttgctgtgcctttaaagaaccttatgtctgcacagtaatgccttagagctaccctgtaccaacaccgtcatccatttgatgcttagtgacaaataagggtaccaagagttgatgacctaacccaggataggtccaaaggttgcgggcgagtgactcacattgtactaatgacttttggccttttaccaaaatacccccaaacattcaggactggtaaaataccacaaaaatagtttagaccatttctacaaaaccacgtaggatcgtttttaaccctcctgcttcattttctctagtgagtacttttcctccccctttatctctccaacccttcctccctcaacaaaaagcagctggaaatcatctttagccaccactatccctccctgcagaccagcacactgtctgctgcctccttactttaatcaaattctaccacatccagcacagaatcacacatgcacatatatgtgaatatggtagttgagttctgaacttcttatttaaacagcatggaccaaattaaacaggaagcattattctgaattgaatcgagcttccaacaagtaccagtttgagcaggattgaaataaaaatatatcatatttaaatcagattttaagccgaagagaatattggatgtagcagactactggatgtttgggtgtgattttggcaaaacacatagtgatataagaaggctttatgttatcttatgtgcttgttgccttgttatcggtcttagaccaggggtgcgacactaaccctcatcaagctgacagtttgacagcacctagagcttctccctaacgcggtagagagattctgaggcttaatttattgaacacttggtttctcattgcttggttaaaagagacatggtcccatccttgtgaaaagagacatgagaaacttatctccaatattacggaaagagatggtattgaccaatataatcttatctctaaagtcgagtagtcctcgtggtgttaaagtaactgcatgaaatgtagtacctctgtcccaaaataattgtaattctaagttgtttagcatatattaaggtttgaggagaaagactatggtgtccctcattaaatggtgtatatgcaagagcgggagggtggttgagggtagaataggaagaaatttgaataagaagtgattgatgggacaattagtactctattgtgacaactattttggaacaaatttgaatcctagaaataaaattattatgggacggaggtagtaataatgtatgtggtgctacagtaatcccatggtcagaaatcatgctaagacattgggctatgacactttatgcgccatctggcttaacatgtcgtaaggtatttagatattaagagtgttaaggttgcaaattctacacgatttaaaaagttgtgtaaactaaacaaaacagtaaaaagagaatggataaaaagaaacatgttcaaggattttttttttaaaaaaagaaacatgttggatgggcaacaaaaggttatatcagttggaactagtggagattatccaaggtaggtatatattatcctgccggacaatgtgtaatcctcttaataaaatcgtatttgtaaatagaaggctctcattaccagcttggaagaaggaatttagatgcaactctgccatggttggttgttagggcaagtccagctgtaactttttgtctctttggtcaatagcttctattagttttatgttgtctaaagaactcatgtatcctcagcttttgtgtaaatattcatttatatgttttgatatattaacagttaagccgttgaggcctcttctcctgttttccttaaaaaaaggaccgcattcaatttcacactgaattcactgaaagcagtcaaacaagaaaaatgttctccagtgtgggcatgtccagatcagtatgaacccatggccataaacagctcatgcattgccagttttgaagctaactagaaaatcgagcacactacagagttcatgagatcgattcatcatgggcagtcgaatttgcatattatccgaacgagagttaggaatgacaactgcagatagtaaaatcctattgaaacacagcatcggataactactaaaaacaaaacttgcatgcttctccagataaagaacaagaaatacttacagtggtgagcaaggcgaacggcccccattgacatagtacacaaacaagtatgaatcataatgctgccctcttatgtaatagaaatgtggaagtcgtctgacaagcttaaatagcatcttattgtaaaagctgatagcaggttggttatatgagatgacatgcaaatagacacccctgcaatttgagatacttgcagcatatttaatcacctctcggaccagtgaggatgctgcaagcgcgaatgcttgtgaggattaatcagatcataatcacaaactgtaaaactaagttggacgagcaggtaacaacctatgccgaggtttctgtagctctccactacaccgagcgtcaggatatacagaagtgtcagatctttgcgtgagctgttatacctaaacaagtcctcaatctgcaagccaaattattagttccaccgagctcatcagtaagatcgatgcaatcttgcatgtcatacctcgctatcttgtgctgcaattattctcgtggttacaaagcctatcagctcatctctgcggtcatctgatctgctggtatccacagcaccccaagaaataataccattgccgttgaccacgttcaagaagaactctctctcgtatctgagcaaaacaaatacaagaattaagggattaattggtccaaaaaaaaggaaaaatccaccaataggctgcaacacttctacaactgaacatgaagggtgatgcgaccgtattcataagcaagaacagcaaaggagggatcagggagcatccatttgcagtagtcaccttatgggaaacagcgcgaggtgaatattctcaagaacctcgagatcggaaggctggataggacgatacgctatggtggggtagatttccgatcttgggtccaacatgagaagccccggtaacgacgacgactaaccagagcctccgccacgaggtccgcggcgcgttgcgcggggggagaggagcagcttccgggcgtcgaggcgcggcgccgcgtcggtgcggttgacccgcgccacagccgaatcggcggacccagcgctcggtgcagcgcggcgaggaagagaggcagtacggcgccgggagaccgatcgatgcgtgacccggagagaaacgggagagagatgcaggggaaggttctgggtggagaagggagggaggggaggggaggtggaccagcggcggcggcgaccggaaggatgagaggaggaagaaagaggaagctgatcggctgatttggattttgattagttgaagctaaactgtcgaggggatttcttattttaatccaccaaaaataaggtgctctttctctttaatcaccggtgtgtgaattgtgattgaaagatgccgccagccagccacgagaccattctagaggtgatatgtctcgatatcaacaggctaaacataataaatatttttttatcaacaatagcaataaaactatataggatgaataatttacctctaatccgttttgtttgatttcgactggattgcagaaattaagaaatgacatagttttatcaatttgttttttcattgggtataatttaaataatgcttcctctatttataaatatgtaaggttcataataatatttgattaagggtttgttcactttgatgttaaaattaacctgccaaattttggcaatattggtaatactaaaatttagtatgtacagagtagaagttagcctaaatcatttatttggtttattacattcatgcataatatatatgtaaaaataacatgttttagtattttctaagaacatgttagtcattttctcaataaagatcggttaccagttacattatgtttggtttcgtacttctatgtactctgttcatgtgatgctacaaccagggtttgcatattcaattattcatcctgtccatcttaaattgagggtgttaggaactttccttcttggattgaggagttagaaagaaaatataatagacggtataggaacctatatttgcagcatgtgagtatatgtttaaaattattatgtatcatactaaaatataagtattttgaaaaaaatgcgaggttttgtgaaacatcttagcctaaaagctattgttccttgaaataaattgtaaaaaatgaggttttgtgttatggatatcaaaatatatggttttgtgaaatttgcttgtaattttgtatagatggttttgttaacatggtattgtctttttcttaaagaaaatgtattgtctggttacatgggagtggccctggcaccctcatcctatttgacccaagggaacacaggaaaacttattaggaaacccataaaggttggcgggctgggcggccagggagcgatgccacgtcagcgttttgctacagtagctactgtgcgcgtgggttggattttttcggaaaagcccttccatttttggtaatcaggtataggcccctcacgtcatgtgtttgaagagaaaaaatcgcgtacaggggcttcgttgtgatatgtggaagatgagaggctttttagcaaaacaacatccactaccgcatacctcttcaagccctagccgccgccagccgcttcctcttcctatctctctctcccgtcccgcgccaccaccgagcgccagcgccgccgtcgccgcctccgcctctgcctccccctcgccccatccccgtcgccgagcgccgccaccaccccctcgcgccgccgcttccactcccgccgccgtcgccgccccctcaaaccctagccgccgccacccgctcgctctccctctcccgcgccgctaccgagcgccgccgcctccgcctcccccttgcgccgtccccgtcgaccggcaccgccaccaccccctcgcgccgccgccgccgccttcccatcgcgctgccacctccgcctctcgccgtccccatcgacggccggctccggctccggctccccctcacgccgtcgccgtcgccgagtgcagccgtctctgcctccgccaccgccatcgccgtcgccgagcgccgccgctgccgctccctccttgtgtaaatgcggccgatttgaggacggggatagggttttcgggtggatttgtgagggggatagattagagtttctggttttctggtttggtcatcggaggagatgagctcgtcgacggcggccagcatcgggccgccgcagccgccgccgccccccacgtctcccgaggaaggtgggtggctaggtttgtttgccgcttcgcttcgcggtttgctttactttccttctcgtttggttgatgactcgatctgctactggtgcagagaagtgcctcaacttggagctctggcacgcctgctccagcccgctcgtctgcctcccctccgtcggcacgcgcgtcgtctacttcccgcaaggccacagcgagcaggtgtcgtggctcagtgcaatgggatgctcacttctggtcagcatggtgtcgctcgtctgtctcgtcctgctccaagtaatcttctgttctctgagtgtcccccaattgaatgtttgcagcttttttttcctgattatatgtgtgcgctcacgttctgtttctctcatttgcattttacagtccaggggaaaccatcaaagaccatggtggattgccttgccatcttcgtggtaagtatggagttttcagtggttaaaagtttttattagtacaaaagccaaacaagaaaaaaagattgttgactgtaatttactcgagtctgaatgtagttgtctgctatggtaccagaaccagcatagtataccatgggtaatgcagtttgaaattacagtacagcaaagtaatttaggtgtccgttgaattccttaattgtagactaacaaatgtccacatctgtagtaactgaatatcacatcgcatttgtgttaatatatattttatattgtgattgggtaaaaaaagagctttacgtaaggaattagatggtgaggctgacttcgaatggatcgagtactgtggtttttatttgtacgttttttgtgattttcttttgctatggcttccatttgggtgcagattttgagtcctattgtttggattagattgttcaaaatggatattccaaatggataggttggctgggattattagaaatgtagtttcagatcaagctaatcctgaaaattccacgaggtgtgatttatgtctttacaaatttcagacaaattgatactctcttcgttatatttttcctgtgcaggtcatgagacaatgcacagctcggttgatgaagccctcttgctaaatgtaccgcataatcaaatcaagatgcaccttgttttttgtttttttttgttttttgtttgcataagaactttcatttgagctttcagtgtatactagatcgactcccgccgcaagcttgtcccattgaatagtgatccaccataaccattcaccaattcggttgcaaatctgaaattctatgatcttagattcttggtacagctggtgcttcttctccaagactctcgccgagcgcgaggcgttctattacgtggttgacaacgctgctgtcatggacttcatcactgtgaacaccagcggctccatcctcatcaacatgctcaaggtagccccttttccttctctcaagtctcactcctaattaattagaagaactctcttttgttacactcttctgaatattcaaagaactcgacaataattaaacagtatagatgcagaagctagaaaacatggtggcttcatgagattgataattactctatgatattgtacattagagattttactttagcaatgtacaacactaatggtctatttatttgcctgtagcagtgaaatatctttgaatattttatcgattactctggatcatgttgaaggatatcttgaatcggctgcaaagacaataatttcgtgacgactttgttcaggtggggtgcagagtactacattaaagtggatgttgatttacatgtaaatttatatgtgtgcgaaatgttgccctctgatctaacatcataccccccttcttttaagtcttacttttcctacttaaatttgacctattcagacatttcatttgcattgaatttctgctaagtatttggcatacaaattgtacactcaaagttgataaaatctcatgttgtattttagagatgatgcttctgaagctaaatttcaaactccatacactttaaaattctatctcaactatagtgaggctctaaaaaccagatcgataaatgttgcagcaactcttcgaaacatgctaagcatcggtcaaaggctcaagcttacattggttgcatgaaatctggtccagtcttagctcataaaaaagtttccctgttgactattgctgttgtgttttccctgatatttttaactcctcaccaaatgccatatttcccttagcctgagtataggaaatttggtgaatgggggaacaggtgcatttggtttacaacaattcagttctctgtaatctccaaggatctagcttcttacatatcaattcagccagtaaggtatttcttcaaacatggttttttatctacacgatatttttgttttttttctaacatttacccatcattgaccaagaacaatggtgtcatttcaggctttttctctaacaagagtctccctgttttgctgtctggctttgtatatctactagctttacctgtatacatatatgcattgggggttagctcagttttctctcacatgctttagtgttactagcacatggtagtatttttcataggtatgtcaacaaagtagtttgtatgtatatctttaaattgcttacttaacaaagatgcgaagaatattgctaatgcttccctggtcactaggaaattatgaaacctctgtccatagacttgctagctaatactggatcactagacctcattggcgggagggggaggagaggaggggtttggcttccccccacaatttgagattgttatacattgtggcttaaagattaaatcaacaccactcttaacaaattaggatcgctagctccattaccaaatgatccattctacctcataaaacattctttctcccctaatggtttcaattggaagaaatttctttcctttaccagctatttgtgtcatttatagttggtcgagttctcatttcctttttgattgagtccattgttctaatcatcttttgttgtgtagtggccaaactatctgtgttggattgttatgggagtatattataggtcattttctatcttcaacagctcttgtatcattcatttgttgctccaaaacacatgggtatattgcttcagcattctataatgcaccccaggaggtgcttgccttatgttctcttcacaatttttttaattttggtttgtcgtgtactctatgtacttccctcttgtgccttgatatatatccggcggtctcaatattattgggaacttgtcattgtggttggcagattcatctttgaaggagctgcaggttggactaattgtttccatccttttttactttaaataaattttttgctttattgctaagcagattaatatttcatttgcatatgcatatattctttatgtatttatgtggcccatctttcttttagtgttggtttgccagttgtttgtgtcacaccataattctcatattaagatataataattgttcgtgcgatttcaatcaaaggcatatttaaaaatgatatgagaattgttcattatatcgatgtttatttaagggttgtgcaatttaagtcacttattattgtacaaccatctagcacaaacgtttttttgtattttaagaacaattgatctaatgtaaataatttcatacaggttgttctatatgtgttccaactgattcacttgtagagttaatacaaatattggttgaaatgtacacacatatacgacattggtgcccatctcttctatcaccatctgcgaggcctcactcaaggagatacaccatcagaattttgtgagttcccctttaatatttgagtttgttacttgaccctgcaagctacgatgatcacaaaattgtgtttattcaacaatagcttaaatttcaggactagaacatttcttttcatcgattatgtgcatacctaattgtttgctcgaatgtgaaagtaatgtcgtacgatcttgtttcctaggcttttttcatttaaaaaaaagatttgagcatcccatgttcttggatatgtcgagaagtttcatctttcttcccatgtacagagtacaaacactttctgtttccccttgactattctaaaaaaacaaatcgggatatggcttttattattgtgcgcctgtttcaagtgtgataggagatcttatattgtgaaaacttatttcaggtgaggtagaacgggattgttcattatggaagattagcactacactcttgtttgctaggtaaattttttccctactctcttttcatccttaagatgtgtattattgcctattcagacattcatctatttgatattaattttatgattgatttttgtctggtgttacacataagatgatgatgatatacagtcaaaggcatacctgatgtgatttttttattttcctaggcatatagatgattaaagtcaggtcttaaattcctgacaattttaatgtatatgcttctcaaaagaatttctcagcattctgtacattttcttcttgacttaaaaatactaatgagttacatgcaaattttctttttagcttaaaaaggatattgagctaatgatagtgatgaccaggtgggtagtaacttattgtcttgtcgggaagatttgaaaatattattatgctatatatgttgtatattatcggagccaaccatttacttataagtgattatggctggctgcagtgttccttttgaacatttatgtgaattttgaagcctggatacattatgaaatccgaatatctccttttcttttcattggaaaaaaaatttgtatgcaactttttttctgagcaattacttcctgttgtagaggctgcagagtttgaacttgttgagcccatctaaatactctaaaggagatgctgaaagaggaggtggatgagagcactaaaagaaagtttgatagttgtgggttgttctttggtttactatggttaaaaaacaaactatgcagttcagtttctgatagtatttgtcttccctagctatttagaatgtgtaaagcatgtttattatcttagtcttagctttccatttctgattttggggctatcatgtattctaattcccatttctcctttggttgggaactctgtgatgtgaataggctttggtactaaatttttatgttgctttaactatagattgataattgaactttgagattcatctgtattgcaaatatcgctttggtattactgttctgactctgattaagtttgcaaaatgatgattctcattgtatgttgtgcaggagctatctaaggaaaaagaataaataagatcttatcctcttcaacatgatgctatcatccttggtcatcaggaaaaactcagaagaccatggaccactcctgccactcgttgtaagaaagatgatcataaatccaatctgatattagttctgtaaacctaaatttttgtcctaatctataataccaacaaatttaggtcgacaaaaaaaatcaatacgaagagatcatgcttaattttataaatggctgacctcagggaaaaatgttgcgaggattggggaaaaattgttgcacatcaatctttcttcatgacgaaaatgatgcccacctatcttgcttacaaaatgatatattttacgattggtgtagggtcatatgcattatcacttcttctcaattttatgctgtttttttcatatgatcagagataaattgtgcctctgttatgataggatacatacattttaatattagttatacactcagcaatatttattgtttcaaacatagtctctcagattagcgctacactttcctatgattccattgctttgttcgcctttgattaattattgtttgttcgatcatattggttgacgtggaatacaaaacagtcaggggtcttctttgtgaaatgagttcattcgaacacagcctaattgggttacagttctttgatgggattcaggaaggcacatatgaatggtgcatagaatttatctaatttatctaaatgctccaaaacactactttgtgcaatattttttggtacagcaccaattctcctttatgttcaccgttcttcttgttgagcaagcatttagaggtgccatctcccagcttcgaagctaatttttgatgcaaggtttggctcgtatcaattttcattgtgggggggggggggggggggggaaggtttgttcgcatttgatttaggcaaatggcattctcatttttaccattctactgcctccaaaccccagttacaagaacaaaaatcaaatgataaaaatgaaatattgagattaagagcattgcaaataatattctttctaaaaatagatgcaattcttctgagtccatgtgatgaaccttttggagtggttaggatctgatcatgagaattgtcagttatacacctatttaagaaatctctcaaaacgtgtatgattaatgtaacgagttaaataatttatcccgatgcctaatctaatcctttactcaattatcttgcaggcaatcttgatcagttaattgctccagtttaaagacttttttcactataggcaggtgagactgaagattgtttgtcagttgaaactgcgctgtgtagacagtagcccttgcttgagaaatgatggctatgactttgaccctttgatcatatggaacaacaacacttcagtatgcaagaagctcttggaagtggccatttacatagtgcaaaatatccatgaattactattatcccttttatccatcagaattatgttacttgtcgtctatggttttaataacaccaaattttggtgtaaacatggtatctaaacactgttgagcgatccagctatttagcacttggaaaatctaccactaagttatgtcgacaattttttttcttatttacatcctaagcttctaccaacaacataaaatatatacatttcatctctgtgtatctggctctatgaactttattgccctcttaattctttctattgcaccgttcatgctacaataactcgataattcactaccatcatataccatacatatctaattatatgcaaacgctaacacactgcatcctgtcattcctatttaattctctataccatttttctaatacatataactggcatcaaacttcacacttccttaccgtactgacaaatgcgtactgtatagaacaagctgtgcacatgccttaccgtactgacaaatgcatgtagaacaagctgtgcacaggaggcgcgcaaaggcgcgccccatcctctagttcatgtagaagcccgttaatctagtactaacaacatgggaccgatgcatgaggtactacttgcgtgctcttcttggcttcatttgggttggggactgtgtttggagcaaaacgatacatggattaacgcataactaactatatattagctaaaaaatttaaaatgattaatataatttctttacaactttactatagattttttttaaaaaacatcgttaacagtttagaaaacacgcacgtgaaaaatgaagaagagaaattagcaatgtggaaaaaagagttaattggatccattccattataaattctttagttttgaaatatgacattactattcacttatttgaagtgatgccattagattgaaggtatttgaaatatgccgctacatacccttttaacacatttaacaaaaactttaaaccaaattgccctcgtccttttcctttgtctcctcccatctctcctgttcatctccttgatttcttccttcctatttttcgcctgtgaatctcggctaaggacacccccttcacctttactccggcgcggtccttcaaatcccgcgaggaggagatgaacgtggcgtcgagggctgggtcgaggcggtactatggttcgaccctgtgaagtggacgacgccgagggactagaggccctggcgttggagctcagccatagccgagggaccgtgatggtcgtcgtcctcagcggggaaaccagagctcggacgctcagtagcgaggtgcagggcttatagtggctgggtagacataggcttggtggatccatggcagcagagatgaataggatagatgggaggagacagaggaaggagacaatgataatttggtacaaattttttgttcaatgcatcaaaggggtatacagtggtatatttcgaatatatgaaaaaatgtaatggcatgatttcaaataagtgtacagtaatggcatattttaaaactgaaaaatttataatagcataaatctaattaacccgtaaaaaagacagctcaagaatacgtgagaacacatgagacgcctcttcacttgacacttgatacgtgcgcccttcaacggtcatcatggcgaagccgatctcatctcaacattttttcaagtctaaaatctccgatcacgctaacactgcataacgaggggttactatagaagctaaggccaccacttcataggttatagcagacattctttgctcttgcagttgatttccttgataataaagtaatcagagagaatgtattggaagagggttattcccaatatccatataagatttttatttcttttacatagcctaggagtagttgatttattgttttagaattaatcgcaacggcaaaaatggttcgtcatctctaaaatcaaagcaagcccatatgtctcaaaatttttttggagaaatttaaatctacaacttagaaaatatgctgataacaaaatatcataaattatttatgtttttaagaggaaaaaaatataatatcttcatctgacttacacttcagcgataatgtttagacaattgatcaaatgtttagccactggatggatagtcacaccatgtgtcctttttatgcgcaggaggtggaaacaactcaccatatattggtggagtgtatcttcacgacaagtttggtataagttgctgttcagtgtcaggttggcatccctatcaccccgctgacaagcttcgtttccaatttggtcggagttttctcgccagcagctgtaagtcacaacagaaagggggtttgactccccttggctacctcatcctcatctttacctggcacccgtgactagaaagaaacgctctggtcttcgacggaatctttctacggtggagatggttgttgatcacatcgtgcaagaagagaagctttgggttgcggcgttgcctaatccactaggagacttttttttttgcactagtgaatagccttttttcctttcctcgttgttctacaagttcggtttcttccttagttagtatagtgtgccctttctctcctccataactttccatgatatgcattataaaatttctcttttttctaatatatcgatgtgtttttgcgtgttaaaaaaagtttcgacatggagaccttttttttcaatcggtactgcagtagctctttggttaagtattggagcaacactacccatcgaaaaaaattttaggaccgtttttcttccatccaaagcgctgccgtcgcagccaccggtcgggtcgagccgcgagtcatctctgcataacccccgtgactgactggttggggttggaccggttttcatctgttcttgtcctgagaggaggcgagcagaaggctcgtgcgaccgccacgagaagggcgacgacggcggcgggatcaaggtcactctcgactcgacgacgacggcttgctcgacggcggcggctggcggctcatccccaaaccctaggtccgtcccaacactccaagaagccggcgcgcggcggcagcgggatcagggtcgctctcaacggcgacggcggctggcggcttgctcgatgatggcggctggtggctcatcctcaaaccctatgtcgagagaagcctcgtcctcggcggccgccgcggcggcgggggtggctgtgagggatgttggggatgacaagcccttgccgtcggcggaggttgacatcacctactgggcggcgcaggaagaggcggctgcgctgcttgagtcgatggccgcgagggctcgtggggaggacgacctaccggaggagcagctgcaagccaataaccaactacaggaagacgaggtaatgcttagtactagtactagttactagttcgcccattgcactagaatgtgtgtataagttcccaaacagtatcagtatgcagaaccatcaatcatgcttatggtgaacaaatttcgaagttactgtttatttgtgcgaagatttattccggatgtactgtgcgcagtagtactcaagtctcctaagacagatattgcagtgaaattacacctatataacattctggtttctctcggaggtcctaaaatctgcccagcagttctgatgagcgcatcactttcaattaggataccaaaatatggagatatatttatcaggaaagattaggatcactcaacttatacgtagctattgcctggcgtaatggattagcacattggaatactgccagttcaaatagcctaagtagtgttatgtttaggtaatagcactgcaagctatttttggtgatgatatggtgatcttggagaataaggacaatcttcgatttattcaggtaacataagtttcttttgaatcttctgttgtcctcaacttctatcttttgagaagattgttcatgaattattccacagatttttgtgcattatacacttcctgatagtatccgtgtgttcttgaatcttcgtcgaagtggagctatggttggaactgatgatagtgaaaaccacaatggcggagaactctatcatcttgcaggttgcagcatttgccacctgttgtgctaacatgtttgttgccacggtcatatccaagtatatgtgctacatattttaccatttcagctaaatggttggatgaaccaaaggtctcatacctgtgtgctgcgcttgatgaggtttggacagagcttccagggcaagaagtcatatacagatgggtggattggctgaatagctcttcgtggtcttccattgctttgaatgatgaaatagtgttagatccagataaaacattaaaaattggagatgaacgagctatcgcgagaagaattttagttgagtctactattcctcttatgcagagttacagtgagaagagatctcataagatatttttggaaagccttctcgtgtgtggaatttgtctaagtgaggatgttggtaattctcttgaactattaacctagttgctttgtcatttgttacttctgctacatttttttaaaagtttctattattgcactttacaaggcagaaatttcatcaagctcccatgccatcattccttttgtttgaagtgtatggagtctcactgcaaaatccatgtgaaagaagggaatttaatgcagctggcatgtcctgatacaaattgccgcaatccacttccgccatccgtattgaaaagccttctacgagatgatggatatgcacaatgggaatcatttgctctacagaaactgttagatgcaatgcctgatctagtttactgccccaggtgttctgctgcttgcttggaagttgacaatgatgctcaatgcccgggttgtttttttaccttctgcactttgtgcaaacgccgccgccatgtgggggatacatgtattactcctgaagaaaaaatacgcattttgaaggtaacaatagcataatctgttaagaatttatcattgttgtgaaatccagtaatactgtatgcattgagtatctatagattttttttatggttgttaattatcatatggagctcactttatatggtcatatggttgcagtgcttatctacagtagttcaaagtattgtaaaggttcccatgtaataattctgtttgaatttatttcatgtatgctgctttcctttcacaagatgttcacatgaacttttgtgggtgcatgagtttattattgtactagggcagatctttctcagtgacaacatgcttatgtatctgatttaataatgaaagggcctgacaaggatgtcatctatgcgagtaggccccagaccccaagttgtttccccggtaattagctagtgttagtgagctaaccagggtacacaaggcattccattctgcccactgcctcttctttcttttgtttcctttttctttccctacaggattgctttaagctaattgtaatgttttttcccttctgctataacatacacacagctatgctgtttttttcataaaggaaaaaaatgaagaatgaaaatgccatggtctatttgatggtgtgaatcaaatttcctacatcctttttttaaatctatttaatgttgttcactggagtactttataacaggaacgacagaaattgtattccataccagaggaacaattgttgaaagaaaagagggaaatagacgagttgataaatatccaggaagcacttcgtgattctaagcaatgccctcgttgtaagatggctatctcaaaaattgaaggttgcaacaagatgacatgtgggaactgtgggagattcttctgctatcgttgtaacaaagcaattggaggatatgatcatttctggtatgctgttgattaatgtgcaaatatttcatattcgattttctgcatattgagctagcaactgaagttattcctaccgaaggaatggaaactgtgatatgtttgagagggaacaagatgaaaacccacagcagcaggatgatgaaaattttggtggcgaccctgacgaagatgctgaactcttagaacctgaatgggtgctgttaacttatccctgtccaaactgtggccgtcggaatgaaaaggttagcagcagtgaacttatttcaccggattaatttggcgtgttttttttttcttttccacctagagcatggcagttttcagtaaatttctgcttagcttttggcttgtactagtaaatttctacaggacactgcttatgtgtggttttaggcttttagccctaggacaaaatttgcctaataagtagtatatgttctgaaatgtcccgatgtaatatttctgctgttccttacatgtgcacatggatttcaattcatgcttaatatcatctgtcatgtgacagtcatacatgtacagactgttgctgtagttaacgcttcccttaagttgtaaaaagccaaatgaaatctaccacacaaatgcagtttactaacatctcatgttggctcttactaacagctcggtaccaacaatcatatactttgcatcggatgccgaggccattattgtgcgttgtgtcggaaaagagttttgaggggcgagcaacactttggacctagaggctgccagcaacacactgaagattgatagagatctcgtatgttgatcgctatgcagaatgttgttttgcctattccaatggcatactcgtacctctgtttctgacacccgctttgtacccaaaattagagttttcctgtagctgtatcatttaatttgcatcaggaatttcataacacttaccagttataggcagttacactgtttatgtttgtggaaaaacagataccatgcacctgatttgaacaaaacaggttttggcttgtaattagtgaacagttcaggtgtgtggagaatgaaaattcaattatccattttaagcatgtaccggccagttgatttatttcacaactctcaaaactgcgtcagttcattcacgattaactctacaatgcgtatcttgttggtaacctgaaatagtttctactgcgcactactgttcaggaagcattttaccgtagaaacctgaaaccctgtactagtgtactggaagtaatttggaaggaatcaaggacgttctactatgtagtatgtactccattagagagggcattcatggtctgaatcgataatcaccatggtcctcaatgagagcaaaaccacgcaccacagagcgagcccgaaaaggaagacgacaacgtcgtcgccggttcgacgcggacgccaccggcgatggagcccgcggagcggtggcgccatcctcgaggttccttcgccgccgtcgccactgcggcggtttcaaatgatattactagtcctaaaatatgagctttttcaaatgattttggttaaatgatatgcatatattatgaatctggataaatagttgcgtaaaaaaaaactggataaatggcttgttcaaattaatatccgtctaaattcatatcactagagtttatctcatccaacaaaaattcctaatattttataacgggactaatcttcgatctcagccacccatactaaattggatgtagggctgagggtgactttggagtataaacggtaatataaaataattgaaaggtctaatatgcagactactaaatgattaccatatcttgatctgcgccgccgaccttcaatcgggtggcaacctaaatacccggttttatagtttgggggtactagatggactcttgggtaagggtgggcattcgatctgaccgaaaatttcagtctttgtctttggtctttcggtcatttcggtctttaaaaagtgaagaccgaatttcaacacaaaaatgtcaggaccgaaaaattcggtctcagtcttggtcctgaccgaaattcagcaacattttcacatatgcaaagaaataatagaaaatttcaacacgaaatcacaaaaaaaaatcgtaagcacatatgagtaaagactcttattaggttgtatgcctagaagaagtaggaatgtgaaaattagagtttaatcctattgaatttagtggattgtaggttgcatttagacattttttttaatttggtctattcggttaaccgaggtgactaagcgaattgaccgaataaaattcggtctttcactgcctagaaccgaattgatgaccgaatttctcggtatcggtctttttggttcgatctttttctgcccatccctactcttgggcatagtttaggggggatttgactttttccttgcatttaaaatagtataggttcgcgtgaaaaaaacttactccctccgtcctaagattttgggtggatgcaacatatcctatcacaataaatccggatagtcaaaaatcccttatgtcatgggacaaaggggtacctactcgatatcgtccgcctagttttaatcgaacggtggacacgaacctacgtttttggcgtctaaaacggtaatacgccttaaaccgagggtctccccaagaaaactacctcaaccagtttgtactgggccgcggcagctgactatcgggacccacccgtcagcgtgattgcgaggacggcccctctttcttcaaccataagaagaaaagcagcatcgccgccgcggcaaccgctcgccggagctctcaccgcatccccgccgtcctcggtacttctctcaggcgaatctcacgtccacgttggttcctccgctcttcgccggttcgccccgatgaggtaacttttgcttgtttctctgcttgaccagagagattcagagctggtgcttgtcaattggtgccaaagttcagtacaatctgcagaaccaacttataccaaattaaacgaataaaattttgatcaatagaacttcgattcgcattggctagtagcatttaaatgttcagataatatcgagaccactggtagattagattcagccgcagctgatgttcagttagtttcagaaaaaaaattctgggcaagtttcagaattagagctaatatacggcacgattcctctcgcatgagattcacttttttcttttatcttaccacaaacattacacgccattagttccttctgattacgattttatggacacttccgaagacgaaggccaagtgagcagcggctcgccatctcccatctctctaaacatcaaagcaagcgaacaatctattccctgggaaattccgatgtcgagcgaagcctcgtcctcgtcctcggcggcggtggcggtgagggatctcggggatgacaacccctcggcgtcgccggaggttgacaccacctactgggcggcgcaggaagaggcgaccgcgctgctggagtcgatggccgcgagggttcgcggggaggaggaactctcggaggagcagatgcaagccaacgaccaactacaggaagacgaggtaatgcttactaagttcgcccgttgatcatgcttgtggtgaacaaatttccgatttgctgtttattttgcgcgaagttctattcaggttgatcaggatgtgccactactgtttctactatccatagatgcgaatattagggaatgatctaatatcagataattagaacgggtgaggcttcgaacccatgtcgtctagcccaccaccttgtagagctatccggaaaatccctgggagtttctcctgttctactatccatagattgcattggaaattacacctgtatgcttagcttctcagggaagctatagtatctgccctcagcagttctgattcagtccatcactttcaattaggattattcaagataaatgtgtctagaaagatatgatcactcaatttgcatgtagctattgtgctgccgtaatggatacgcccagatgaaatattgtcagtttataaaagctcgctgagtggtagtcctatataatttttttttcaggtaatagcactggaagctatttttggtggtgatatggtgatcttggagaataaggacagtcttcgatttattcaggtaatacatgtttcttttgaagtttctgttgtgctcaacttctatttttttagtagtgtaatgttcatgaaatattcctcagatttttgtgcactattcacttcctgatggtatccgtgtgttcttgaatcttcgtcgaagtggagctttggttggaactggtgacaatgaaaaccacaatggtggagaagtctgttatgcttgcagattgcagcatttaccacctgttgtgctgacatgtttgttgccacggtcatatccaagtacatgtgctccatattttactatctcagcgaagtggttggatgaaccaaaagtttcttacctgtgtgctgcgtttgatgagatttggacagagctcccagggcaagaagtcatatacagatggtggattggctgaatagctcttcgtggtctttcattgctttgaatgatgaaatagtattaagtccagatagaacctcaaaatttggagatgaacgtgcgattgcaagaagaattttagttgagtctactattcctctgatgcagatttacagtgagaagagatctcacaaggtatttttgcaaagcctttctgaatgcggaatttgtcttagtgaggatgctggtaattctcttgaactctaattaccatgtcatttttcacttctgttatatatatatatatatatatatatatatatatatatatatatatatatatatatatatatatatatatacgtttttaagtttctgctattgcattttactaggcataaatttcatcaatctcccatgccatcatttcttctgtgtgaagtgtatggagtctcactgcaaaattcatgtgaaagaaaggaatttaacacaactgacatgtcctgatacaaattgccgcagtccacttccaccatccttattgaaaagcctgctgcgagatgatggatatgcacaatgggaatcatttgctctaaagaaactgttagatgcaatgcctgatctagtctactgccccaggtgttatgctgcttgcttgcaagttgacaatgatgctcaatgtccggactgtttttttaccttctgcactttgtgcaaacaacgccgccatgtgggggacccatgtattactagacaagaaagaattctcattttgaaggtaacaataacatattatgttaagaatttagcattgtcgtgaaattctacaatatcatgtacattgagtatctttagattttgttatcattgttaattatcatatatagttatctttttatggttatatggtctccgggttatccatagtagctcatagtttgcaagtttcggttttgcttgtctgtttacagttagatgtatatgctgctttcctttcataagatgttatccacatgaacttttgtgagggcagagtgcatgagtttggtagaatttcctaagcaagaacatgcgcatgtatctaattgaaaaatgaatcaaaggatgtcatctaggccccagagtagtttccccagcaagatccgtgttaggccccaaagtagtttccccagcaagatccatggctgtgtttagatccaaagtttggatccaaacttcagtccttttccatcacatcaacctgtcatacacacataacttttcagtcacatcatctccaatttcaaccaaaatccaaactttgcgctgaactaaacacagcccatgtttggaaattatagtgagctaaccagggtacgcaaagcgtgccattgcccactgcctcttcttcttttttttgtttcttttttcttttcctgccagggttgctttaagcttacagtccttctgctacacccaactatgctatttttttcacaagaaaaaggatgaaaatgacatctatttgatggtgtgaatcaaatgtactacaaacttttttttctctatttaatgttgttcactactttctaacaggaacgtcagaagttgcattccatgccagcggaacaattgttgaaagaacggagggaattagaagagttgatgaatatccaggaagcgcttcgtagttctaagcaatgccctcattgtaagatggctatctcaaaaattgaaggttgcaacaagatgatttgcgtgaactgtgggggatacttttgctatcgttgcaaccaggcaattaaaggatacgagcatttctggtatgatgttgattcttgtacataatgtttcacgtccaattttctgcacattgagctagcaactaagttttttcctgctgaaggggtggaaattgtgtgctgtttgggacccacgcgcactaccaaattcgaaacccacagcagcagcgtgatgaaaatcctggtgaccacgctgaactcttagaacaacgggtgcagctcacttatccctgtccaaactgtggcagtcggaacgaaaaggttagcagtactgaacttatttcaattgagggcgtgttttttccgtttccacctagagcatggtggtagctttcagtaatgctccatttgcttagcttttggcttctactagtaaaatgttttatgtttgtcttatcgctattaaagctatatatgttaatggaaatttgcctctataacaaactagtatacttatgaaaagcccgagtaatatttctactgttcctggcatgtgcacatgcatttcgatgtgctgaatgaaatctaccacatgaatgtggtttactaacatctcatgttggatctttctaacagctgggcaccaacaatcatatatcttgcccgggatgccgaggccattattgtgcattgtgtcggaaaagggtcttgaagtgttcccaacactttggacctagaggttgccagcaacacactgaagatgctaggtagagagatcatttgtcaatcgctatgcagaactttgttttgcctattccagcgtcatatactcatacactgattttaaaattgtacttacctgtaacagtacccaaaattagagctttcctatagcagtacaactttggatttgcagtaggaatttcttcatagcactttactacagtcgatattggtggaaaaaaaacaaaagcacacatatacctgatttgaacgaacaaggttttggcttgtaattagtgaacagttcaaatgtgtggagaataaagattcaattcattcatttgatcattacaagcttgtacccaccagttgatctatttcgtagttaacgcaattcgcaccagttcattcaagattcagcgctgcatttcacgtccttgtttgaaacctgaaaggagaaccaatatacagcacggaacattttattgtgtacgggaagcaatttgaaaggagtcgagggcattcttttatacctaaagaagggataatcttgggataatcaaggcccactcaagagttaaaaaaaaaagagcctactcaagagttaaaacaaaaagatttggagggagagacatccctccaaacactttttaggaagaaattgtgagcgtattaaagattgaacatgagacctcgaaattgaaaccacacacttcttaccattgcactatcaagtgcatctcatgacccattcaaaagttggatcaaacgatgatgaccatggtcataggtgatgcttttttctgattaaaatacacatttttcttaattttcattatcacatgtttttcaagctgctagagcaaaccacacatcacattctccaatagaagagggtaggagatgtcacatcaagcgagcatgagaaagaagagtctgtgtgtcgggccatcaacgtgcgctccacgaccggagatgtggcacacgaagcactcgacctttctcttctcaagcaaaatgggatccccacctctttcacgccatcttcaaggttcttctcctagactcttaccatacagcccctccccccccccccaaccatcgtcagctctactgttgcaactcacgtcactatggcggtctaagatgataatactacaaaataaataaactagcccccaacacctaataatatttgatctcagccaaccatataaaatcaggtggaggactgacggtgatgggttgtttagcgaaccaaaacacggtaatatgaaaaattacctcaattgttattgtatctttgatatgaaccatctaccttcgatcagatggtaaccgaagcaccgaagtttgatacaatttaggagcttataaggtaaaacggtataaaggtgagggttcgcacgcacgtcgtatatcatccacctaattttaataaaatagtggaaataatgcctagttctaagcgaaaatgtgtacttatacctagtccattgtgaaacgtagtcaacagaatatagtataagatgcaatttgcttaaaaaagccctaggtttttggcgtgtgaagcaggtaataagcattaaatgctcacttcttacccggtagtaactattgtaggactagtaagtagttgcagcccggtaacacgggtacaaccgggtaacatgaattaaactatcttatttgcagaatgtctctgacaaaagtcatggaaataagtcatggctagagacggctatcggtgattttttctgaagctggtccctggcccacactactgacacactactatcaagttgggcaagtaacattgctgttgccctaatgggccgcggcagctgactgattggacccacccgtcagcgtgattacgaggacggcctctctttcttcaaccttaagaaagcagcaacgatgctgcggcggccgctcgccggagctccgcccgcactcgccgtcggcacctctctctccggtgaatctcgcgtccacgttggttattccgctcttcgcccccgttgagttaacttttgttcttttcttttcctctgcttcagagattcagtgcggctgcttgtcaattgttaccaaagttcagtacaatttgcagaaccattaccaaattaagcgaataatttatttatcaatagaacttcaattcgcattggttagtagcattcaaatgttcagataatcgcgagaccacgggtagatgtaagccgcagctaatgttcagcaagtttcagaattttttttgggcaatgtttcagaattcagagctaatatacggcacgactcctctcgcatgatattcactgttttttttatgttaccaaacagtgcaagccgtaaattcctttcgattacgaatatacatcgttcgaagacgaaggccaagtgagcagcggctcgctcgtcgcggccgtggaaattaccatgatgacgccgggatcgtcctcgacttcggtgccgggagatgaggccgacgccggcaactgggatgcgggggtggagacggcggcgcggctggaggcgatggttcatgcggaggacgaactctcggaggagcagattcaagccaacaaccagacacaggaagatgaggtaggacaaggattacccctgctgtttcttggatcatcttttctgctgtactttgcacagttacgcatattaggtttctgacagacttgcactgatagatcgattttaacatattatccaggaatatcttgtatcaatgtggtacctatatggttcagttcagttagggggtgtttagatccaggggtgtaaagttttggtgtgtcacatcggatattatatagggtatcgcatggggtgttcgagcactaataaaaaaataattacataatctgtcagtaaaccgcgagacgaatttattaagcctaattaatccgtcattagtaaatgtttattgtagcaccacattgtcaaatcatagagcaattagacttaaaaaattcgtctcacaaattagtcgtaatctgtgcaattagtttttttagactatatttaataatacttcatgcagatgttcaaacgttcgatgtgacaaggtgtaaaattttagggtgggatctaatcaggcccttagttcagataaaaagcacagatctgttgatgtgttcagttctaccgttaagtacatatgaccagatgattgttattgccgatgatactatctagtaattaacctgatatgaatctgcagctgctggcactacaggccatctatggtgatgatttggttatcttcgacaataaggacggccttcgatttttccaggtaacatcaccccctcatatcttcaccgtgaagaaccttgcagtttcagaagaaaaaaattatgattaatgtccacgtctcattgtcctcagatttctctgcactatcaactcgccggtgacatccgagtttacctgaatgtctgccccaacgggagaacagaaaccggagcagaaaacgacgacgacgacgacagtgaccgactcttgtatgcttgcagcctgcagcatctgcctcctgttgtgctagcctgcctactaccacgtttatatccgagtcaccgtgccccctacttcgtggtcgccgcgaagtggctggacgagccggaagtttcaagcttctgctctgttcttgatgagatctgggcagagcagcctgcagggcaagaggtggtgtacaaatgggtggactggctgagcacctcttcctggttttgcattgcttcagatgatcagattgtatttggaccagatgcagactcggctggtggtgatgaccgggcaatcggaagaagctgctcccttgattctatgatccctctaattcaacgttacagcaaggagagatcacatgaaattttcgctcgaagaatccatgagtgcggagtctgtctcagtgaaaatacaggtaattgatccatttggtgctcaaactgtgcaatgcttgctcaagttttaaatttgttcttgtacactgatatggcaggcagaaacttcatacagctcccatgcagccactccttctgcgtcaagtgcatggagacgcagtgcaggatccacgtgaaggaagggagcgtggcgaggctgacatgcccggacacgtcgtgccgccggccgctgccgccggcgctgctgaggggcctcctcggcgacggcgagtacgcgcggtgggagtcgctggtgctgcgaggatgctggacacgatgcccgacgtggcctactgccccaggtgcagcgccgcgtgcgtggcggccggcgacgacgcccagtgctcgaggtgcttcttcaccttctgcgccgtctgccgggagcggcgccacgtcggggacacctgcgtctccccgaaccagatgctcgacatcatgctggtaattaactaattctaacaatgccatgcatggagagagttcttccttccttgatctcatgacacacaaactctcacggtctcaccgtcgatctgttgcaggaacggcagaaggagaagaggccgttggcggcgccgtcgccggacagccaggcggtgtcgtcgaagaggaagatggaggagcttctgagcctccgcgaggtgatgcgcacgtcgaggcagtgcccgtcgtgcaagatggccgtgtccaagacggccggctgcaacaagatggtgtgtagcaactgcggccgccccttctgctaccgctgcagcagggccatcaccggctacgagcacttcgcgtacgcatcactcccctgcccccaaatcaaatgaccaaatctttcttctcctatgatcttcttacctctctgctttggcgtcgacgcagtggggagtgcaagctgttcgagagcgtcggcaaggggtggttcccggggcaggcgatgtggatgaacctcgaatacgactacgacgagatcgccgagatcgggacgccctcgtggatacgggctatcaggtatccctgccctacctgcggcgccaagcgcaccaaggttagtttaccaagcaaacttcagaatgatttttactacttccttcgtttcatattattataaatcggttaatatttttcttagttaaacttctttgaccatgttatcaaaatatattcaatataaaatttaatcaaactaatttgatattttagatattgctaaacttttctataaactaggaaaaaagttaactaaagtactaatcaattcttcagagatgtaagtacaccaggcagtaaaatggattggttttgctgctttgcagtcgggcaacaatgaccttctaacgtgcagaggatgccgaacccattactgcgcgctgtgctcgaagaaggtatggagcatcgccgagcactatgggccagcagaatgactgacatggcagtacattaactcagcaaagagtagatgacccactgttcacataagcatttgcaaattttacttactgtgtaatgggagtaatttaaaaggaatcaagggcgctgccggctgccagttcagcaatgctagcatgtagtctcaaactctcaaagctgccgttacagagtataaactgttcatataaacaaatctgaaaataaaaagggagtcagagaacataatcaagaataaccccgcaaaagaaatcgatcatgttgctattctcacacacgattcattgactatatacatcgctcccggtagtttaagcacacagaagcatctgatttcatgaaatgcttggacatttcgtacaaattttttccatacaatgcaaacatttgaatgtacggtacatcatgaatttgcttgtggaatcttgtttttttttttcgccgggaccttgtggaatcttgttgctgattagttccataagacagccccagtcaaaaacctatggttcagtacagcttcagcaattggacgcttacgatagtccggatttagcattgcctatggcaaagaaatcagtcagtgttctttctgaatatatatttcggtgaaaccaatagtcggattactcaatcctatgtgttgtttctgaatatatattttggtgaaaccaatagttggatcactccatcctatgttctgcaatactactagcatattcagatattcttcagcagcggaattttttaacaatatgtatatgattcatagaggcaaacctgcaacaactcccagccggcaccatcacccaagtctagaaaatctacagcttcggacaaccggtcatctgccagaaagtacctacaaaaaattcctgaagctaataagcatgcctattgaatttgaatatcatgactgaaaaccagtcgagaaataagcaataacagttttctcaagtagacttgagagtgagtagatctctctacaactaaactatgagaaatctggttttgttctagaaagacatactctcttgcagcataaatgtcgagacggaacgtattctccaaaagtctctgcacaataaacctatgctatattagttatctcaatgctatgaggaaatcaccattttatttatgaattacaataaaatatcctcagtgacctgcaatgaaatgccatccatagttcctgcttcgcaaaagggaataaatgacatgtatgcaagaagtagcccagctccatatctgttttgtcaaaagtacataagaatacatgtaactagtgctttgtcaataagagggaaaggaagatacttgcatgtcgtcagctattccaaaagctcgcttctccagaggagttgatgctccagcagcagatgctcgacgccacagtccatccgacaatgctccagaaccaacagacgaatacctgcgattgtcaaaagtatctgttttctacaatgttttcttcttttctccataaaacaaatgtaggaagggaatagacatatacccaatatctacagagaaagctaaatcacggagatgcggaaccaaatagcgcccatttttctctgctacagtactaaagaaagtcacatctactaatggttagttgaattgaaatatcataaactacaaaatgaaaattaaagcattccaataaaaaagaaaactaaaggaggaaaatgcagcatacttgagaacaacagaagagggaccaaggctttggtgcagtctatcatgattatgcatgtgaacaaggccacacatagctccataaagcagcttaagaacaaagtatcgctttagttccaatttgtatgctcgatcgtaaggattccagaacgatatggatccagattgctccttcagttttctttcactggttaattttgcatagtctgcagcactatatctcccgtcatcacggaaggcaagccactgtacaaaagctgtataagtctcacagtcacagcattatactgacagtctgtgaatggacaagcttatgtggtagacctgctctccagtagccgtctcaaaggctcctaacagaaactgaatgttctcgcagatgtcactagcatcattctgtaagtataaaccaagaaaaaaaatatttttacaaatgtcttctctaccaaatcattcagacttgcaggtttctgttagcagttctgtgaatttcctaacctgaagaaaagcatgagttcttagctcattaactgccatcaagtcagcttcagaagcaccagaacgggacccaggatatacctttgtttcaaaacctatgtcttagcacacataagatagtcaatagattcatacatctagagcggagaaaggtagcaccatcatataatccaagcaataccttaaatagagcttctgtgcccttcagtggaccttgaaccactcttccctcataaagtctgcacttgactatgacaagcaaataaaatcagtggacattttctatcaggtagcatacaaaatcaccatgtcaagtggaatgaaataacctaatattaacttctccttctccaacatcttgagctctcaatcgctcaatctcttccggtgaatatccaagaccgaggttttgaataccagcaacatctggaagccctccaaattgagaagatggataactatttcacatgaaaggaagttagaaacggtgaatattaaagaaaactctgtcaattatttattcttataagtagatcgcaatatgccaaaaaatatgctcaaggtcatgaaaaatctggtgattctttagtctagaaaaaccaatacaactatactctcatcaactcattaaaataaaaactatatgaagtggaacatattagatgcagcatggttccattgcatgttgtaatgttctacaacgttttgcggaaaattatcagaatcagtagtaataacatatgaacagatatctttctggctgcccacggcattttctttagctcattggactttttacagttgtagaatgtcatcacgaggtgccaaaaaatgatgctagttgtcacctccaaagcgtttctctgaattggccatctcctaattttcctaacctatgtataactaggtaagcatatataaatgccatatagaattgtcaatatctcgataaatcttcacctcaagattgaaattttatcataaactggccatctccaagtgattcaactggacataagcaaattaacctaagggacaggcaggaatagtacgacgcttgaaccatttccacatagccaaatactgggagctcaatgtttacatcttttgtactaaaatgtttaaggtaagctcacctctacaagtgtggatcccttaataacttctcaagaagcataaagaaacgaccacataatcaagaaaaaaaatcaggaatgcggaccttgtgatgttcatgaaaccgtagccacccaagtatcttcccacctcgaagtaagcgggattggtcatcagagccgccgaaatcggcggcggagaccgtcggaaaggtcgccggcgccatccacccgggtccagcgaggagaggaaactggtgggaggagctttcagcatcgtaaccgacggagcagccggagagtggagactgacactctcactggtgtgtttggggataaggcagcaaaagcctctcccagccacagaatgccaggaacagctaaatttgttatttttatttcaaaaattaccattttccaagaaggtaatccaaaaagtatttgttgtcttatgtgcggaaaaccatttttaatgcgtgtctccgttaattggatcactagtttgctcttgttgtttgggaatttttatttacatcttaaaaagactcatggtttacaacttaaagttacgaaaaaccacgtgtattatgagattttgcatatattaatagttttatggtttcaatgttgtataaaaccccacgttaattgaaatcttataaacttcagcatattttaaacaaatttctaaaagcgttaaagtattaaactatcatccatagtgactaagaacttaacacctaaaatttttatatacattatatgttttagaattttaagcaatttcgcgcttaaaatacataggagtatggtattgtaaaattttagaaccatactacataatacataaggttaagtgcaacatgtaataatgcatgtggttttctgttactttttattataaaatttaagttttgtgaaatttaatcattttttattttagactcgtcgaagctggaaactggaacactgaagccggtgggtgtgcctgtggatctgacacctctctcccgtaatccaagcattttccgttacgcccctgaggagagagagagaggcagagattaccctgcattacggggagtggtagtggtaggtaatccggtacatcgcgcgcgaaatttactctccctctccacttgctctcccccgatgactcctacccaccattgctagtccaatacaaagaatccgcattggcattctgcaatggcaatggcgaagctgcgcgagcgccggcagctgcggctgtccgtgccggcgtcgccgccgccattcccgcacctggaccaccccttcgccgccctgccgtccacgccgccgggctcgcccgtcctggcggagctcgagatgctgtccgtcgtcgggcgcggcgcgggcggcacggtctacagggcgcggcaccggcgcacgggcgccgcgctcgcggtcaaggagatgcgcgacgacggcgcggcgctccgcgaggccggcgcgcacctccgcgtggccgccgcggcgcccgaccacccgtcggtcgtccgcctccacggcgtctgcgtcggccaccccgtcgccgggaaccggttcgtgtacctcgtcctcgagtacctcccggagggctccctgagcgacgtgctcgtgcggggcgccctcccggagcccgccatcgccggcgtcacgcggtgcgtgctccgtggcctgagccacctgcaccgcctcggcgtcgcgcacggcgacgtgaagccgtccaacctcctcgtcggccaccgcggcgagatcaagatcgccgacttcggcgccagccgcgtcgtcacgggccgcgacgaagcccaccaccagtcacccggcacgtgggcgtacatgagccccgagaagctccacccggaagggttcggcggcggtggcggcgccgacttctccggcgacgtgtggtccctgggagtcgtgctgctcgaatgccacgccggcaggttcccgctcgtggccgccggggagaggccggactggccggcgctcgtcctggccgtgtgcttcgccgccgcgccggaggtgcccgtcgcggcgtcgccggagttcggcggcttcgtgcggcggtgcctggagaaggactggaggaggagggccaccgtggaggagcttcttggacaccccttcgtcgcgggaaagccgtctcgttgcgagcgccaaaacgagtggcgcaccaccttccaggacaaaactggccaagtgaacacgagcatctacggagaagaatagaagatgaaattaaagtttaaaaggaaaaaacaattttgatcgcttaattggatctttgatcagagctggtaatgatgcaagtccaacgggaacgtgaatgagagaggactggttagtatagatgatcatctggacctgcatgatttggtgagtcctgaagagattttcttttgcttcacctggactaggatcagttttttggaaacaagttctgttaggattttcagggaaataagttaataagatagagggctttggtttatttgtggtttatcggaaacaactacacgtcgggcgctcgatccgggataaaaaaaatcaggtgcccacgtcatgctgacgtcagcaagcatgcatgcatgcaaaactattttaaactattttttctcttaaattatttatccaaatcatgatccgattgcactgttaaattcgttgcaattaaatctttaaaacaagaccacacatggatatattccgataaaaaattagcttattattgaattatttttaaatgttgcacgatgttccaacaagtatatcggaattgtttcactaactagatcgaaaatgtttcaatcgtttaaatcggatgtcatttcaccttatataaaaacaatgtttcagtaaatagcgaaaaaatatttcagtttactgcaatatttgatccatatagtgaaacattataagtacattaggtgaaacatttttggtggaacaaaaaatgaaacgaattcccttaatagagggtttccataatatgagtgttttgttgcaaaagaatgtttcaattcactgcaacattacatctatacatagtaaaacattgtgagtacactaggtgaaatattttttgtggtacaaaaaaaataaaacgaattcccttaatagagggtttccaaaatatgtgggtgatttattgcaatggagtatgtggtgaagacacgtgtgtcaggtggcagggatacgtggggcacgtgtgcgcgttgggagggggagcgaccgattatgctccctcccccgagcgatcgagtaggaggattatcatggtttatcagataattatccgtataaatctgagatatttataaaacttcttatcgttgaaggataaaactgaactaatcacgaaccctctgtgcaaacagctgaacttctcgagggcggaaaggcatgtggaaatgtggttatgatcaagatttttgctgggccatgagcctaggcctgctggctacggaagtccattggaataagttcactggaggtccctcaacttaatagctagatcttttaggtcctttaaccacaaaatcagaaatgtgtacccctaaacacacaaaccgtgcactcacgacttgtttggtaactcaagagaaggggattgggagtttacacgagggaaatgatgatgagattaagatgtaaatttgatttttaatcccaatatcttgtttggtagaggtgatggaaattgatagggagtttagttggagattagatcattaataaaaacggatggctgagatttgtttagataaagtaaaggaggaattccctcccaattacctgcccctacccaggtattgaaaatgagggagtttcttcctcaattccccatccccatcccaccaaaattcccatgtctcccaaccaaacaaaacacttaatagcatcatccctctaaactcccaatctctcctaaaaactccctccaaccaaacgggccgtcaaggtcctatggcagtatatatgggtggtttcgccgacgtggcatcctagtcagcaaaaaaaataaaaaaagtatgtgaggcccacatatcagttgcactttttttttcctcttttctctcttctgtctcttctctcttctattctgcggcgggtggtgtggcaatggcggcgtgcttccgctgcgcgcggcacggcatctggccccacggggcccagcctggcgacctccgtctacgatactcacctcggccttgccacgctgtcctggacgcgcacctccctcagcctctcgctccgcgccatgctccacctctcgtccccggccaccccagcatccaactcagtagcgggggtggggatatacttcgataaggacaccgacggggagaccctagcctttcgtgtccgcccctggctccacgactgccgcgtcgagcacctccgccacctcgacctctctaggaacagcctcaacagcatcttgccggcgaagctgctcaacgcgaccgagctccgggtgctctcacttgccgacaatgacatctctagcgtgctccccaatggcggctccgtctcgtacttgctcagcctccaggagctcaacctgtcgaacaacgcgctcgccgggcgcctcccgcccgctctctacaggctgccgagcctcgccgtgcttggtctcaccaacaactacctcatcggcgatctcgctgccttggagggcgtcgacttgagcgccaactaattcaatggatttctctcgtccgacttcggtgggagccggctacgattcttgaacatctcgtcgaacaagctcaatggcgctatacctaccgagttgtccgccgtcgtgccggcgaactcgacttgcacacacttcccggtctcgggttcgcccaagccttcctcttggttcttcgtcgccgttgtcgccgtaggggatttgtcagacgccgcctaccgcaagacacgggcgaggttccccgccggcccgcgccccgtgctgctctcccgacgggagcacgtctccatgcgcgacgccggccacaggcaccggagctgggtgatcgtgcgtggcaaggatcgggagatctccgtggatctcgtgtcccgcggctggggcaaggacgggaggagcagcagcagggaaaagaggaggagaagaagaaaagagaagaaaaaaaagatgtgcatctgacatgtgggtctcatgtacttttttttctaactaggatgccacgtcagtgaaatcacccatatatactggtataggacattaagtgcacggtttttgtgagtttagaggtacacatttctgcttttatggttaagagacctcaaaaattctcattgttaagttgagggacctccggtgaacttattccacgtccatttaatctggcccaacttaggctagaggcttcggtaagcaaggtaatcaaacagtggggactgagatggcaacggtgaattcatcgtcggggtccacatccgcgtccccgtcaccgcggtgataaaatttggtgacggtgataaaatttcaccgtccccacccccgtcaaccacgacaggggtacattttcaccagccccgatcaccacgcggtgaatttttccccgtggtgaacccgccccgcttgaacaataaattcatccccaaatcatatatatgcaatgaacacaaatcgatggcaaaggaatcgatggcagccgatggcgtgctggctggccggaggcggtgagcggcgcaacgacagttggaggcggtgcgcacgcgtcgacggttggaggtgccggtcggtgcgacgatggtcggaggcggcgagcgcgcatcgacggccggaggcgcagggcggcgcgacgacggccgaaggcggcggtgcgtgcgtcgacagctgggggccaggaccgcgcccgcgcaaggggatgcagcggccgccggcggcgccgacgactgggagccgggaccgcgcccgcgcgaggggatgcggcggccggcggcgccgtgaagcagtggaggcggcgctgtggacctcggaggcggcgggcggcgcgtcgtcggccggaagcggcggcgtgcggcgttgcttgtgtatggagaaggagaaggatttggggggaagggtagactagggttagaggtatatatataccttgtcattgggcttcaattctatgggccacatgactaataaagtctagaaatgatccctagctacagttaatgcgggtcaccgtgggagacggggacagggagtggagcaccgtccccgcccccgccatccccgatggtaatgaattttggaccattagaatcaccatggagggtagatgttaaccatccccatcacctaataggtgaattcaccacggggaagcggtgaacgggcccccattgccatctctagtggggacagtggttggtaaagattgaaattctactccttccggaaaattctataaattagtgtgaaacttctgtgtttcgaagaaactttaaagagttaaaaaatgattataatcatatggaaagagatgtaatcaaatgcaatgaatagaaaaagggagacagatgcaagtaaaggaaagcagggagaaaccaaaaaaaaaagttacatgcattagcaaaagcaaacgcttttgatatcataattgagatccggtgatgattctcaaaaggatgctatgtacgttggtagcagtagtggtaggcctcagatgttggttctgatgaccaaccgcttacgtcacgatgacggcatgcggtatgaatttgcaaactcattggcacttctcaataatataagtacaaatgctacaatataggagtgtgtgatatatatagcacttctcattggctcttcaatggagtgccgtcccatgcccaatcaaaaactacattttcttgggttaaaaatgttaaaaaaagagcactagaaggtagtaaacacttgtgttgtgtctctactacactttcgccttgtgtttgacggcttgaccctttttgtatgtgcatcctagttaatctaaaccttcgccatttactgcaacaccaaacaaattaatcactcttcgtcgtcgcgtcaaatatagcgggtaaattgtgttgatcgattcgtatttgctgtagatgatagtgcagtggccgatctatcttgatcgatctatctcgtccgttggatcagatcactattggttaaactccgccttctgctccaaatcggacggacgtgatccatcggtggaatcatgagagaacggcgggtgatgcgatctcctggagcggagaggcggtgggcccggactggaagtaggtggagactgggtccccctctgtttccgtgagtgggcccgggtaacaaacctgtccgggtgggtccggatgggccagggactcgtccatgggcccccacaggccgagctccttctccaaattctctacccaccactctgctccctcctctcccgggctggcggtacatggcactgttgcatcgccgtcgccgggctcatcgccgccgtagccgtcgatgatgctccatatatccggctcgatgtcgatctccggcaggtcgagcagctcgtccgacacggcgccgacgcacgtcgtcgtcgtcagggaggacgacgagcacggggacggcggcattggcgccgcgaccagcggcgcctccgtgggcgcgtccaccagcatgtccgagatgtcgatgtcttgctcgaagaaggacacgtcgacgttctcgggctccttgctcgtgccgcactgctcgccggccgtgtcgccgctgttgttgttattggccgccgtcgtcgtcgaggaggacgccgacgacgacggggaatgcgcgtcggcgtcgtcgctggcgtccgcggccttgcccttcttcttggtgtcacctggcttctctctctgcgacaccctcttcttcaggtgggtgttccacacgttcttgatctcgttgtccgtcctcccgggcaggcacgacgcgatcttggaccacctgagcaaaaaaccaaatccgatgagaccgaccacgagatcgaacacgcaagaattaactaacacccaagcattgagggccaacgaagaacttacttgttcccgagtaggccgtgcagcttgatgatggtgtcctcctcgtcggcggtgaagttgccgcgcttcaggtcggggcgcaggtagttgatccaccggaggcggcagctcttgccgcaccgcagcaatccggcctgcttggggagggctcgccagttggcgtggccgtgcttctggatgtaggcgatgagccgcatgtcctcctgcggcgtccacgaacccctgttcagccccaccttggcgcagcacggcgctcgtcccctccccatgcccacctctgtctgaacgtttcccggacagagtagcagtggatgatggatgaagcagaagatggtgatcgagagcgcatgggagaccgggagggggtggtatatatgtgcacgcgccgaggtctgaaacgggcagggcgttctgtctcctctccctctccctatcaccttcctatagcttgtttggagtcttaatattctaaagaaacaactggttggtaattagttttcgagaatcttgaagaattgggtttcttaatttttagctttcggttaattttctggattttacaactacaatttctcataatttagatatttcttattttggttttgaaagaaggtgtagctaagcttcccaaacagttttagtctctccgacgtgatgatgacggatgacaacctccccatctctgtctctctcgttcgtctcccccgttctcttctactcctacctccgagacgagactattgcgcttaccaaacccctgtccctggaaagcgacgccgtgtggcccctggccggcggtcgggttcgtcggcggtgatgtgtagcgggggttgttaaccacggcgtgctcccttctctcgctgctagcgcgcctggcgatcctacacgtgtgcttagctgccgctaatttctagctttggcgcaggcttttggagtagttgtgtgggagagatttgaagtggcaacctttttgtgatgataatgtactgtatatataactatttatatcctttttgttttgaatcctatctcctgattacaaattcagtagcttttcatcttattaacgcgtgaaagtgtgttctagttctaaatgtgtgtaaatataactagcatggcggcccgcgcagattgcgcggctagcatcattatattttctctcatataatagcatatctgttttctcattatattattaaaatatattacaatgacaacatagttttaaattttgcaataaccttacgaaactactaatgtgtaatattcatattgtattttatatacgtgttagttattaattttttttaatatcaaattttagttatttgtaaattatatatattcctatatggactatagacttgtcttttaatattttttaattctgattttttattatttttaattgtatttttatgtggactctaaacttatctttcaatattctttaatctttaatttcaaatttcagttacttctaaattgtatttctatattgactttaaactcttcttcccatgtttttcttaatttcgaattttagttactttttctctgattaatgtgagaatttctaggtcatgagagcgaacgtagatgcacctttttattccgaattttagttagttttaaattcctatacggcttatggactctatactctacttctaatattccttatttttagattccgaatttctattttttttcttaattgtatttctatatggattctatactctacttctaatattccttatttttaattccgaatttctattatttcctaattttatttctatatggaccgtatactctatttctaatattccttatttttaattccgaatttcaattatttcctaattgtatttctatatggactctagtctcctcttctaatattccttatttttttaatttcgaatttcaacaatttctgaattgtatttctatatggactctagtctcctctaatattctttattttttaattccaaatttcagctatttctaaattgtatttctatatggactctgccttttctttttctctaattaatgtgagaatttctaggtcatgagagcgaacatggaggttcctttttttttccgaattttagttagttttaaattcctatatagactctatactctacttctaatattccttattttttaatttcgaatttctatttttttcttaattgtatttctatatggactctatactctacttctagtattccttatttttaattccgaatttctattatttcctaattgtatttctatctagactctttactctacttataatattccttatttttaattccgaatttcagttatttcctaattttatttctatatggactctggtctcttcttctaatattccttatttttaattccgaatttcagctatttctaaattgtgtttctatatggactctgtattttctttttctccgattaatgtgagaatttctaggccatgatagcgaacgtggaggctcttttttctattcctttaattatataatagattttgatttttaatatatctcccaggggctatatgaagtagcagtgggggtggtcatcatctaccaacgtttttatatagccgtaaaaggtctagttcaccgggaaagtgcacactttctttccgagcaaaagttggctgaaatgtgacggcatgattttcttgggcctctggagattttgtcgttgtcttattcttgtagtacatgaaaaaaaaattacagtgagcaaggtttttcagtgttctatatagcatattaaagttgcgttctcctttagtcattaaaattgtttgtgtgtctaactaaactcggcttttggtggaagcctaaaaatgtgttttcttagagagaactgctgatcggttatgcaagtagacctttttctcctaatcaaacattagttaaggagaaaatagatatgtaaaataaagcacttcgcttaaaatctaaattacatatatactattattatcttttgaaaggaatattaagtccatgtttctgtttggagagcttttaacagcaacaccttttttcagaatctctaaatctccaaataatttaaatttcgagtgtgacgtttgtttctattaaaaacgaacatgaatattaaattatgacgaaaaaaaagaaaaccactagccatgattaattgagtttttagtcattacaaacttgaaaaagatttatctaatattttaaagcaacatctatacagaaagttagttttcagacaaaatataccatttaacagtttgaaaaacatgctaataaaaaatcaaggtaaaatccgtatcttaataaaaaaaataacggggatgcatgctaagggcacccacaatggttatctataaactctctacaagagatccatgtcagaatattttcctacttggaagaaattaaatgaagagagagagcaaaactatctactaacctggagatggtctatagagaaaaacgtggcaatagattagagaactatagatatccatgtagacataccattaaagtggtttactattaatatagtctattgctgagatgtacatgttttatagatagcaccttactttaccattgcgggtgctctaatagcccaaatagtatctgaacacttcaatgcttgccaaatgatctttgtacctaggagttggtccttttgaagacagtgactttgcttttattttgataaaatagatccaaggttgaaggatgcgatacgctttcaccgtttatgacactagctcgtgcacgttactgagaaattctacagcatgctctatttaattcttccaggaaattaaatggcaactagtctgctgaaggctgaagcctacgacagaccgttcaaacaagtgggagaaaataaagtacctaatcatcttaaagtcgtttttaagcaactagcggcacacatttttgattctgtgtacttcaaaggtcagtgatcgagctcctacacaagatagcaatttaaacaattctccacatttttggcaagaaccgcctaattctacaactctagggtgctactctgcttgattgtgatatcctaagtcctaactccaaatatgtaggtggccactcgcaaggttaaagatattccggtcataatatcataatatttaacatttaggacatggttcaatcaaattttaactaccatttttatgacagtacttcctccttccgcttatatatgtcattgattagttcttttttttaactaaccaacgtaaaagagaaagtacttttaagacaaatctatttttttttcttaaaatagcatttgtgaaggtatttatggttaaaatcttaaaaatagacctaagccttgtcgtaaatataaaatattcacaagcaggggagtatataattcagaaagacaagtaatgagatcgagcaccagccaaacatatgaggcaagccaccatacgtgattcttgtagcaagtctatcaacagtggaaaaacaaataatggagctactccctccttctcaaaatataactatccttagcgtttaaaaacttgtcctatattctttttcatctactatttaatttctttacctattttctcttcttaaccaattacatattttctccatttaatttcacccactttcttaatctccattaaaaaacttgcatgttcacggtatatattaaggctatgtttgacataattccggatctcatatcctcattggatctgaattttgtacattaaattatagtggtttaaagttttaattttcatttaaaataataaaaaatgatttattcaaatgttattaacaaattcatatatctagatatatggatctgtgaagttaattaggaatacttaggtctaagaaattttgaatgagctgcaaatagggtctaaagtaccagttgctctagtttttcttttaagggtagagtgctgctccagaattctaatactaaacataaatttatatggctgtaacagttgagaattgcgacgcaattcagaacttcagattggaatctctgtccgcatgtatgggctctgcatacttttggctaatcgagtatactagcaattcgacgtagctcaacaacccgtccttttccatgccaaaggcttgagagttccgattccagtgtgtcacaagatctctcaagtccatgagttgggagtgtggtcagtacaagcttagactaccagacagccagttgccgttttgccttcctcgcacctaactcttgacatgctctcgattgataggtcgtccttgtaggcatttcgtcatgtgtcgaattaggactctttaggaggaagaataaggctcgtttccaggggtcccatttccaactcccctttttcgtttttcgtgcgtacgtttttcaaactactaaatgatgtgttttttttcaaaaagtttctataagaaagttgcttaaaaatcatattaatctatttttttttgaaaaaactaatacttaattaatcgcacgctaatggatcgctccgtttttcgtgcaggaggtattagttcttatcccttgaaatcgaacacagcctaataatgggttataatccgactataaacttatactaaagagagataaagaaaagcgataagtgttggctcatgcaagagatagctatacactttctccaaaacatttacattaaagaggagagaaaaaataaagccaatattatagttagcacatgttaattttagtatgagctaatagccaatagttagctacttcctccgttttataatgtaagtcattctagcatttctcatattcatattgatgttaatgaatctagacattattaacattaatatgaaggtaggaaatgctagaatgatttacattgtgaaaaaaagggagtatattattaaacctgctctaagccactgtacgtttcatcagcttcgcactaccgggggagacaatcaaaacccacggctttaacacaagtatcctggtcaagctagctatagttcagtacttcagtacccccctaccaatatcccgagtgacgttctagctaacctcatcgtcatttggacaactgtgacaatgaacatggctggttgcgatcagtagatttggagaggggaaagagacgttccgtacataaatggtgtgtacaagtcaacaacatgcatgcatccatgactataacttgtgtgtctgtgtgtgaaggacaacacaccagtgtgaactctctcaagaatagtaacgcatagaactgtcaactattccaggtaacaatttgttgagaaaattagaaacaaaatcccaggtactcctacgtaacagtgatggcagaaacaaaatgtattatgttgttttcttaataagatatatagttcgaaaaggagatatcacgttcataaaaaaaaagagaatgattttgaccattaaatcgtggtagatctagattaatactacaaatctgtttatggagaattcgaaatgagttctatatcgatccatgtgcgaccgcagttcaagccgagacactggcttgtttagaagggctgaggacaacaactgaatggattcatatgccaataattttgagactcacaatgcgaaggttgtccaagctctaatgcaacatggttcatcgatttcggaagaatggtacttagtaggagtagttcacgctgaattcggaagaatgcagtacttagtaggagcagttcacactagttttcgtaacaaactcgatcgagccatggcccatgcatgatggccccatgggagagacgcagcacggacacacggccggtacgtaccattcctgtcccgctcgattgcacggcgcacccgcgcgcgcggagagctgatcgaccgcctccgccggatccggctcatgcgcgggcgcgtcacctcgctctcgcggcgtacgtactgccaccgtggcaccaccgcgtgagtacggcacgtactggactatacacacggacacggccacacccacacgtacgtacgcgtacgcccacacggccgggcaaagcagcacgagccggacgtatctataatttttatataggtgatccaacatatatatatttatataccttaaatttagctaagctaaaaatataatttggtcaaatatgtatcgtaatactccgtatattaataaagaaccattgtttgttgaaatagaattaactggatttactagctttcttactcttcaaatatgccctctctgagaaatcacatttacatatttataccgagctagttacatgggaaattacacttgtagcctgcctagatcctactagattgaccgataggtgggccctccttgaggggcttccagtaatatcccggggacaggggcgcgggctgcgggctgcgcccattaaggcgacggtatggcgcgcctagggttcccggctccacgctattatccggataatgtcattttccaaataatagcattcttcggtctccgtctcgccgaccgagccatggtgtcagaggtggttgatggatgcttggtgcgctttaatggcgtcccatgctccaccatgtcctccggcttgggctccagacatccggagccgagtaatggcctcccctacggagcctgcctccgcatggcgatagcggggacttcgtccatgtctcgtccttctggctggcatccggatgcaatgccctcggaggatggagcaccccttcttagcctcctagggcctctgcaacggaggcttatgctatgagctggacggccgtagtagcgcaaaggtcagagccccccctcccacattttttttatttatttaaaagttttttttacgtatgtatatttatatacacattgggctaggattttttttcccagaaccacaccctggattcacacgtgatctgcaaaggggcacgtattttttcccactataatttctcccgcacgcggcacatcgatattccctccacttaatcatttccttatgtagcaatttgccgaataggatatgaaatatttgtaaaataataaaatgtgttatattctagactatattttttttatgagacaaatgaagtacatccaaaaaagagatgcacacgcgcacgtagtagataccgtacgtgcaatgttaatactaccagtacatacgacacaggagctagctggatggtactttctaacaaaaaccaaatctcgaagataaatttgaacacaacgtatgtacgtttagaatcatttctaagatttgatttttttttaatggaatagagggagtatgtggttgggcttaggtcgaatagtcgatgtgtgctttctgtagacacggtgtaattagcaagttagccattggctatttgctacattgacattttttttcggatgtgtgtgttaagttagcttagacccgaccttgtcgtgcatgacttccccgtggttgtcatgtcatcatcctctatatatatgcacggtttttatatcggaaaactcaaatcatcccttttatatcgctctctgtcctttggatgattaaaagtaagctactccctccgtttcgaaatgtttgacaccgttgattttttagcatatgtttgaccgttcgtcttattcaaaaacttttgtgaaatatgtaaaattatatgcctacataaaaatatatttaacaatgaatcaaatgatagaaaaggaattaataattacttaaattttttgaataagacgaacggtcaaacacgtgctaaaaagtcaacggcgtcaaacatttcgaaacggagggagtaggatgcatgatcattcgggctcatctggttaacattgtttctagtcattgtctcattgaactgccctgcatcctggtgtgtatgcatgacccgaacaggggcttgtttttcaaacagggttagtccaacgcgaggacctgtgcgctgcagaagcagccggttcagtgcatctcgatatttcagagcgagttatccgagccgccaaaccacagtatgcacgagtttggcatcagttcgacgtgaactgtggggcatgtaagatctactactgttcctgaaactacaagagctttctcgctcctgtctactttgatacagatttcgaatgaaaatattagaacagtactgcttgtttttcccgtaaaagaattgaagccacatatgactatatgagcatatctttgcgagattcaattacttttcggtgtaataagcatcttgttggtcgttagctttggtatcttgtggaactgatattgaatcattggcacggctgcttgtcttgtatctatcattcatctttttttcttcatttgaccagttaacataaagaaattttacttcgtagaagtccattggcaaaggtcagttttcaataatatcatactttctctctgctgaaatctgaacagatcgtcgagttgatcatttagcattgacaacgagatatttgaattttgagttttatgtatttttcttttgaaaaacagggtatgccaaattttgatgtcatctttattgcttctggattgaaagctacccccatataaataaaatgcgatgttttgcacgtgcaactccaccctcaaattaggtgtcattttaccttaattactctgtcttattgtttgacagctctcatatttgacaactctaatactccggtactccaatacaccgagatgcgctttatagcgcagtggcttggacttgctggcatgcacctcatcagctcaggttttagtctcctcgagcaagcttatcattttaccccgtttgatatacaaggatgaaatatattgttgcttttttgttaaaaccattgacaccaagttcagccttagtgtccaatttttttagtttcctctcttgctgttataacattatgaccattttattacaagccaaaaatcatgtcagtatctgtacggataattttgaaaaatgcaatgttaagaatcagacaagtagacgcagcaaaaatattgcactcggggtgttgaagaagtttaaccttttgatgtaatcggtgatgatagatcttaaggatgcatgtgtaattttgtgctagtgtataagcagatcagacgtaaacagactagtgaaattatttaataactatatatactcattcgttgacctaatggtcccaatcaaacagcaacttgatctacttgttgtccactcaacttagagaaaagcatatgcttacaaaagcttcaccaatctgacctgcaaaccgaaacgataaatctacatgagtgtgaaagatcatgcagggttttgcagctatctgacgctggctgaccacctgaaagagatttcagagttgctgctctccttagagaaatgaccaatcagacaagtatgctttagtactcaaaacacaggccctatcgctattagtgtcgtgatgattctgacaaagaagagtactgctgatttttgcatgcacagccccgacgtgattgccatttgtaacgctcagatacagtggctgcgactgatcgtcagtacagatttttgttaatccgaataccccatcgttcgcaaaaataatcctaataccccagctgaagttagccgcgtcaaaataaccacacacacataaaaaattcttggcagaaaagtctagcaaattgattgacgctgaagccaagacctaattaatgtcctttgatctttggcttctccagtcgtatatacgtttttagaagtagatggagcctgtagaactgtttggtttgactcctgctcaaaacttgacacttaaacctaacactgttgcatcataataggtgcaatgtcattttagtggtttttcctcaaggtaattaggtcacattcgcaggagttcagcttaagcttaagctaactaaggtacaacaactagagccttgaggcttctcccactaaaatatatatatatatatatatatatatatatatatatatatatatatatatatatatatatatatatattcacacacacacacacacacacacacagctatgcttgtataagaaatttatattaaattaaacccttttgcactgaaaacacatattgaaaaaattctttaaaactaatcagatgataccaacactgaatgtcaatgtgtcgtacgtctcaatccacatctaacaacaacactactgacaggatgtcaaactatatgaccgagagcattgctaagtcatcaactactactcattttacgtgattcagaagaaaaggctcgggcaagaatcttagtagctttgtgtaggatttgaacaacagggcctgcccataactctctcttcaaccactggcctagcggttattatcggtgaaaattaggtaaggccgggatttggacatggtaaataaagtccagagtttctgtcatctttgaggaatttggtaagatctgtgtcctcttcttcttctagtctgttggaaggatggatgacatcctgctgctgtaagccaagcgtcggggtagtgacgaaacggagcccagcagacaggacatggacagagcacattatcacaagtacgaggctgtaagcctgtaactattacggcgtttcgaaggcaaccgcttttctattcattcagaagcttttttcttgagagaggagagggaaagaaaggacgctttgagtggtactagcgcatcaactatcctgggacacaactatcaagctttgtctctatggttctactgtatgtgtgttctaaggtgaaagattgatgtgtgttttgagccacacaattaaactaatatagctttgttttacagtaaaagtgaaaaggtgtcacctttcctctccaggcaattctggatcaatgaatctcctgctttttagctacttttaccttgtgtgtcgatggcatatcgacgttgacctaacacgatgaatatctcagtttcatctgggtctgggtggcagcttaccaacgtgataatggccagaaaacaacccaaaaaaatcatactgctcgaaccagcaatttagcatccacaaaaccagccacagcagttctgaataccaaaatacatgttatatatacgcaacgccatgcaggggcagatctaccataagagcgagcaatttagggccattttggattggagctaaaatgtgacattaccaatttgttggtatcttgaatagtgatagtatatgtttcaattgtagccaaatcattgataatgcctattaacaatttggcactaatctagaactttcttctctctatcatcaatatttggctttaaattggtagcaattcaaatatgtatcatgcatctctaccctaccaaaaaaattggtagtgccaaaatatgccaaaaatttggcaagggtaaagaaccaaacagccccttagcatccacaaaaccagcaaaagcagttctgaataccaagaccgagtttagatccaaaatttttcttcaaactttcaacttttccatcacattaaaactttctacacacacaaacttccaactttttatcatatcgttcaaatttcaaccaaacttttaattttagcgtgaactaaacacaccccaaaatacacgtgatttatacgcgacgccatgcaaaggcagatctaccataagagcggtggaggcagagcttgagcctccactacttacgcatgaaaactctaactttttttttccatacgtagataggaagggatatttttttttcgatttattcagatcctctgccttttttatccatcactgacatcatgaatggggtaagggtgcgcctgggagatgaataaccagcagccgtgggcgccgccacgccaacaacgtggcggtgaattcatggctggcggtgaccgacgccgacgcgccgcggcgaacccatgcaaaatcgcgggatgccgccgggtcgccggcggacgattcgtgctgcctaacgcgccgttccgctctgtgcggcggaatgcggcccatatgtatggctagcgtgcgggccaaaattatggactgtggactgtggtgaacgtgtggcggcctatataaggaataagttcaccagaggtccctcaatttaacagcgagatttttttatgccgcttaaccacaaaaccagaaatgtggacctctaaactcatataaaccgttcaaaggaggtcccatggcaatacagggggcggctccaggggtagtccaggtggtccttggaccaccctggattttggcccaggagcccctcccccctccccgcgacggcccaaacgaaagaaagcccaacagagactaggtttagtcggtagcagaggagagcctcagaggcgcaccgcgcaggcgcgctcgccgctccgctccaatcctcccccaaatcgcgtcgcgtcgccgcttctgtctcgtctccgccactccctccgatctccccgctcctcgtctcctcctcctctcgctctgcggcgcagcggcaggtgccagcgccatcgcccatcggccgcccgggcccgacgcggcaacaccccggccggcggcggccacgattctacccccgccgcccctcatggcggcgacggcgcgtcggcgtcgggtccctctccctcctgctcgacgagtcgacggctctgctccagcctccctctagtgccctactaccctgcgcccctgccccttgcccccggccgaccggcccctgctagtgcatcggcataggtgagctactcattttagtcttactttgaatacatcggtcatatatgaatgaaaaatgtggatggaaaaatgtgattgaaaactgaaacttagatttttttaagcaagatattgtaagatatttgaattatttatgttgtagctttcgcaacttcgaacttaaatgttggttttaattgttgtagctatcttgcaatatttaaattatatttccactgtatttgacatatttgacttgattttgtaacatcgtgacaatttgagacgccaagtaggaccacccaacgattcgttcctggagctgccactgaggccggcagcagagagggcggagcggcgatgggcgggcggcaggcgagcgcggcggcgggtttgcgcggcaggcaagcacggcttgcgggcggagcagcggcggcatggagcggcgctgggatgcgggcagagcggtgatgggcggcggcgggcgagcagacgagcacggcaggcggaggagggggccgctacggcggaggtggccgaaggaggagcgtggcggtggtgggcgagctccgccagcctactcagcccaccacgttgccgaagaaagggaggagcatggcgacaacggtggtgaggcagacgaactccgagcgcgaagggccccacgcggagctccttggcgatgaacgtgctgtccggccaccggcaggacgcctagcgctcgacgaagacgaagattggttggacgaacacctggtaggcgccgacgaggtgcacgacgatggtgaacccgaaccccatgaggaggttgtccggcaacgcgtagcccatgcacccacatagcatgtagaacaccgtcgtcgtcaccacgctcagcctcgtcgcgctcttcatcaccttcgcctccaacggtggcggcgccttgatcgtgtcctaaacaacaaaacagagcaagcagcggtgagcaaacaaggtttggttagagaaaaaaaaacagagcaaattaactttgtagctaatggtgttagtctcactcacttgtatctcgatgaggatgttggagaaggagtaggcgaaggtgatgtcactgaatgcctgcaggctgtgccacaccttctgcgttgagctgacaccgacgccgatgatgatgtcggtgaggctgccatggatcccgccattggctacaaattcagagctcatcacggtaagcaaagacaaattaaagaaccagaatatctgtatgtgacagaaggaagaattaatggacgttactcgagctgcggcacgggtcgccatggccgttgtggtgtaagggttactcgcgctcgtctgctcgcccgccgtcgtgctcgtccgctctaaccgccaccgtgctcggccgctcgcccgccgtcgctcggctgccgtgctcgcacgcctccgcgctcgcccgctgcccgcccatcgctgagataaagagaagagaaggaaaagaaaagaaaagaaagaaaatgtgcaactgacatgtggaccccacgtacttttttatttttttgctgaataggatgccacgtcagcgaaaccacccacatatactgccatgggacctcctttaaacgatttgtatgagttgaggatacacatttctggttttatggttaagggactttaaaaaatctcgctgttaagttgagggaccctcggtgaacttattcccctatataatatgggccggattgggctgtcgtgatctatgcggcctttggggaagtttcccaaaaggaggagccttttgggcatcggtagattttgctatagatttgtcgcgtgattttttctctcggatttgtcgttttttaggatgttcgataagtgccaagattcgtgcacatatagcgctgggaatccgcataggattcagtcggacggttagaggcgctaatttctttttttgcgctctaaaaaattgatatgcacgctgttctctctcgttctctctcaattgaaactaaaataaaaataaaatacaaaattacagttctatataactaaaattacatttataaattcatttgatatgacatgtaagtacactgtaattttgataataatattgtgtaagtaaatatctatttgttattttcttcaaaatataaaattacagtcctatataactaaaattacatttgtaaattcaattgatatgacatgtaagtgcactataattttgataacaatgttgtgtaagtaaatatctatttgttattttctttaatatatataattatagtcctatataactaaaattacatttgtaaattcagttgatatgacatgtaagtgcattgtaattttgataaaagtattgtgtaactaaatatgtatttttattttcttttgtggtccgttggatgtaaatttaagggtagaaaaaatttgggtgattttttcttagaaatcacccgacaaatagatagacaatcccggcatcggttattcacttttggctgcctggatatgagcgggtggggaataagttcaactgacatccctaaactttacatctagtctgtctatggtgcctactccgcaataccagaaatctctactcctcaactatcacaaaccgtgaaagaaaaaagaactcgaggggcgttgctgcagaggaggcggcgaacgcctccacggcccccgcggtggacgagctcgtgggcgcgctgtcgcggtcgcggcagcggcggcgaacgagattcccaccacgcgggactgcctccgccctttggcaacggccctcggaatcaacgctgatggcagatgccaccgcaatagggatgacaaggcgagcggctcgacgatggggcacgaggcatgggcggagcagcgcatggccggtgatggctgcggaccgcatgacgagcgcgtcggtgtcgcagcgggtgggtgaggtggtccgtctgctggtccgacaccatgtcgacatcgcctcgcattgtcattcttgtcaatcccacaggctcgccggtcatgcctgtcgatcggaggcaaggattgaggacgacactaatgggatgccgtcgcagaaagagaggggggcgccgatgacggagggagtgggactgtgggaggccggtgagctccctccaccttctcagcagctgccgcctcctgcctgcttcacccgccgtcgttccacccaccacactcatccactgtcgtcccctgcctgcttcacccaccgccgctccgcccgctgtcgcactagcccgccatcgctctgccctctgccgccagcagcctctcttgctgaagaaaagaagagaagagaagaagaaaagagaataagaagatatgcgaaccccactttttttcttctcacttacaagtgggcccataattttttaattattttttgatgactaggatgccacatcagcgtaaccatagaaccatacttctataggacccaaattacaaggttttgaagatttctgtattgagattagagatatcctaaagagtaaagttcatcaccggtccctaaacttgtaccgttgtgccatcccagtccctaaactcgcaaatcgaccgttaaggttctcaaacttattcgacgtttaggtcctctaacttgttcagttgtgtcactccggttcctaaataggacggtttaaaaactttatatcaaaaataattcataacttttacatgtgaactctcatgaagacaaactttatattaaaattgtagtcctcgacgcaacctacaactttgtagttgaaaagtttttgaattaaaactgtttagggtcccaaaatattgtgtcatgtttatagattttgaaattttaattttaaagttacattttgggacaaaaaatgacttaaaattaaaaaaaatcaactacaaagttctagttcgcatcgagggctacaaggttgatataaagtttgtcttcattagagttcacatgaaaaagttatgaattatttttaaatataaagtctttagactgtcctatttggcccagatgatatttaaatccaagtttagggaccggggtgacacaactgaacaagttggaggacctaaacgagtgatctataagtttagggaccgggatgacacagtcgaacaagtttgaggacctgaacggtcgatttgcgagtttagggaccgggatgacacaacggtacaagtttagggatcggtgatggactttaccctgtcgtaaagactcgacgtaaagttgagggatgactggtgaacttattctgcgcgggttgcggcatcttctgcacgcgcagcacacgcctgggtcaagaggcccaagattggaatcggtgggttgatatctagaaatgtttatactaggaacgaagtagtagtatttttttgaggcaaaggaacgaagtagtataacataggagtattgtggcagatttgccatttgccagattggcagaagttgaacgcgtattgaggcaagaaaagcgtacgagtatttgcatgccgtcttatgcacgcattctactaatacctctatcccaaaatacttattgctttgcgtatttttttaacttttgatcatttatcttatttaaaaaattatgaaattattatttattttatctgtgacttgctttattatcaaaaataacttaacaattttgtatatttgtacaattttttaaataagacgaatactcaaacattgtactaataaagttaaagcggtcactaatttagtacggtagtacggagatagcactaagacttcgatgactacgagtgtgcaatctcaggcgtgacgcttgcgtggctgtgtgctagtgtacgtgtgcgtccactgttgtaatctcgagagacaaacggggacctccacctactggccgttggtgtcgcactatcctactcggctagtattctcctttccgtctcccaccgacacgccatgcatgacggttgcagtgcaggctccacaaacaaatggccagttggccaccagcttcaactcggcatctccaaaaattttatccacctgaactcgaagataccgtatttgcgtcccctttgcttgcattccaattcaaacaccagaccgaacgcccgctcccatttccgccgcatttaagcgctctccggcctaactgtcctatgcgctagtcgcctccgaccaaacgcgacagcttcatttcagatcagagaccaccacgctcccccgcctacaaagagccaaaatgcatcggcagcttagcctctcaccggggccgaagcagcagcagcacgacgacggcggcaacatcggcatcggcagcgacgcggcggaggtgatggcggtgccggaggagtcgtcggcggccaagggccggtcggtcagggaggagaggaccatccacctcatcccgctgctcaccttcctctgcttcctcctcctcttcctcttctcccacgacccttcctccgctggtacgctcagattcattctgtactgcactgcactagctacacctgaaatgtttgattctttattgtgtacttgggttgattcttttgccttttttgtgccttgtttttcaaagatatgtcgagcttcagggacggagggaacggtggcaacaggaggctgaggatgctgtaaacttctagcatcaattattgtcagctatgttttttttttctgatccgttttgctttgcgaatttggatcagattttgtgctgtatttgctctcaaatatgcgactgcgtacgcagctacttaagcagcagtaattagtatttgtaatctgcaactttatgcaatcttttggtgagttcttaaatcttaatcgtttgaattgcctctgaagaataagtcggggacatggcataaggagaatatatgcggttatatgctcctaccattcattgatacagtagttgatgtaaccacaggtggaacagatgcagtgaggcatatggcctacttttgccaatgttctgtgctgcttgatggagggtgatggtccaactaagcttaagccttatccacaaatcaacagttcaagtagaaattcatggtgttcaataggccatgtttgcacaggaaattggatacaaaagtgtgtttgcagcaagagtctgggaatgcttgatttgagctaagaatacaactgttttgcatataagaaaattttgcatcataaaagtacctagaatacaaatgtaggtcgaaacggcacaaaaacaacaacaaaaaggtgatcattacaatcttaaaatctggaaacaattgtaaacgatatctgaaagatggcaagttccaaattgtaagctgaataaaaaacatcactggcatcccatgtccatatttacattctttgaatcgaacacatcatcagatgaatgtaaatatggattctttggaggaggaatcagtagatcgtggccgtgcggacaggaatggttacagggcttcctgggagatgagttttcgacaattcgctgtccgggtgcttgcgttgttttctttgctcggccatcgtaaatctttcaggtatatcggccttaggtaaatcagcctactgatgcttatgctccatcccatctatttcagcattttcttgcgcatgggccactaggattgcagcctcctgattttccagctcccgtttacccatttcaggttttctggcaggtaacactttggcccgtcaccttcctatgcttgccctcttgtacaaactcttcagagcttacagcagaatagtcctttgccagttcaccatctttgatgcttgccatcctactcagccaccataaatttccctttgagggctgctacaaaacgggatcccgttgcaacgggataggcatattaactattctcttgcacgagtatcacaggtatcaggtcctaggtatcataggtatcgggtaacaggtatcacaggtatcgggtggtatcaggtaccatgcagctagtaccacaacaggtatcaggtattaagtactgtctcatagaagggtatccggttccaatgggatatcgttgtctaggttttttttgtttccctttccttggttgttggtttaaaaaaaagggataagtccattttgcaccccccaaacttttatgtttgtctaaaatacacccccaaattataaaaccaggtatttgacaccctccaactatcaaaaccggacattttaccccctaaagctgttttagacttgttttggacgccatgtcagcataggtctcaccagtcaaacaatcctccttttttcccctaagctcgctgagaagccggcgagctccctccctccgtcagcttcgtccccggcattctccctccctccatccctccacggctccacccacccaccacccccacccccttgatgatccatcaacatccatgccgaggggggagatgctgtggcgagtggcgagcgatgacgcgagatatcatctgatggggcggcgcctggaatagcgagaggtcgaggagatcattgccgcctccctcacgaatcacaagcctgttctccccgcgcgggagacgcggacctcgccggagccacacgcacgaggagtcatcccagcatagcatcgttgccgcctggttgaggatgaggagtcactcggggaggaggagctcgagctcaccagcgacaacaaacgcgcatctgtcttcgtttccgccgcaacagcgacgccacggcccctgtcccttcatccccgtgctcgtccccaccccttcatctccccatcttctccaatcttggccgagggggttggctctactgtgctcttcagcggcgagtgagtagagggagggaagagagggaaacgcaacgctagataatggacgcggaagtcgaggacggtgcgaccagcggcaatggatggatgcgaagaacaggatcaacacaaccggtgtccgtgagctagctccgtaatcaccggttgcctagctccatttgcacaaccgaagactttgaatggcatgtcaaaaaaaaaaaagaagattggacccaaaaacaattaatctgaatgccatgtcatttgccatgcaggctaaaaccgtctgatctgaaacgagggggtcatttaaacggttttgataattggagggtgtcaaatacccggttttatagtttaggggtgtattttagacaaaggtaaaagtttgggggattaaaatggacttatccctaaaaaaggggggggggggggggggaggttggcaacgtgggtattcttctcttgggcctcaaaacccaatgcctcgctcaccaaagcacacgcttccgcttctcttcccagtggccattgcgtcggcggcggagggatggcgaaggccggtggggggatgatctgggcgacggcggaggacctggcgcggagccggccggtggtgctgtcgctgtacaggcagatcctgcgggcgctgaactcgccggcgctgccgctggggcacgcggcgcggctggcgaagaaggcggagtgccgcgccatcttcatcttcgccgccgaggagaggtcgatccacaacatccgcgatctcctcgacgccgcgcgccacaccctcggcctcctccaccgcggccgcgtcccttgaggttgggagaagctcgcgtcctacaacaatctagggttcttgcttattctagatcgtaatattcagttcgtctttgttggagagaccatactgatatgctgtacacatgcagaacatatccattccataaccgaaattaagttatccgtacgaatctattttcagtggagtcaatgtgctgttattcttagatttgagatgtaaagttttcgatagtatgaactggtaaaaagaaaatttgaaacattcaagtaccaacatatgcctttgcattgcccaaatgacctggtatattacagcatttatgttccagcattgttcaattcttttgccttgtgcgcgatgcaatatcaacctataacctttacacataccagaggatttacttccatgaagctggaatctaaagactgtaaacataactcgaatggatcataactatcctgcagctgtaccttgtagcatgaagtagagatttagcttagaacacagggcaaacgcttgttggacccaagtcaaccccttttgcagtgggacatgtggccagtgggcagtgttctcctgccgtgccccaccagtcgatgctccggttctccatggatagtgagaagtacagcagcaccgccatgaaagccacgccagcgtcgagtgcggcagagagaatgtagttgtacctctcccaccacttcttccggtaccggaacacgaagaaattgaagatggtaccaaagagcagccaagagttgtaattcacagccgtcgccggtggcattgaggctgtcgcgccgatgagcactggtaagttagtcagtgttatccatttcttgtttgggaacatcttgtggaagatgtacacgataacagggcctgctgcgccgatgaggaagaaccagttgagggcactgtagttgccatgtggtccaaagatgcggattgggccaatgaggccccaaatgaccgatgcatcgaagaagactcggtcgttggggcatgtccatgggctgtcagctgggagcgaatcctgacaaatgtcatggatggagccgagcagccaccatgccaccccaaggttgaccgtgccggccacaattgtgccaataaactgagtaaaaacagtaccctcaaggttagtaaaatatgtcgtcttgcatgctaacatggttgtcaacaaatccttatgagtgagttgggacttctgtttatacctgaactaggaacatggattttgggggaatcttcatatagtggccaagtttgaagtctgagaggaaggcaatagcctgagacatgctcatgtagccatacaccttgaaacagacgttggcgatgggatgaccagggattatcaacccaatggcatactccgtgatgacgttcagaccaggtgtctgtagatgacattttaaatcattttcagattttgttacttaagctattaaaatgcagtagagtgcactgacagttctgttctagtgaaatgcctcaaattctaacatagcttgcctggttggttgtcgcagagatgatgctgatgggtagggtgaagatgaaggccatgccacaggcaaatagtagaccccaccatggaagctggacctcatgcttcaggacagtgcagaggataagtgccactgtcatcgaaagcgccatcagtgagtagaaccaccacactggtatgtcatcgtacttcttcatcagcctagtgtggatatcaggcttctccttctgcgaagctcgaaaacggtgatagatttccctgcacatttgtttgtccggttcagatacagaagatgtaccgtgtgattgtttcatgtatttatgtactgatcagagaatatcttactttccatagaagaggccgacgtgggtgacagtggaggcaatggtggcaaaacttagaccataagcgagcgcgaagaacacactgaggttgatcctgccaagcttattgtaagcatcgatatcaagctcaaacttgtcgttcacgatggctgtgatatcgtagctcgtgccattggacatgaataggtgcgaggagaagatggggaatgtcttggcattgtacaggtcgaaaccccagtatgctatgggaacgagcacatagaggaagagcacgaagccgacgaagatgttggcggtggcaaagaagggcgagatgagcgggctgaagaggaaggaagagatagctgtccagtcgagcgagaaggccccaacgcccaagcccttcaagccggagcccagctgttgcgccgtgacggacttggagaagacccagcacacccatgagatggatgtcagcgtcgggaagaggtaacccggtacggcgtaccaagcaaagctgcagatgagcgccaccaggaagaacttggagcgggatatctgccgtgacccatggggcaactcatccttctcgtgcagtgcccttagacaaacattgagatgtgtaaagattagatacgacgtcataaaaatatcaaatatttaggcaatatgtactagttataagtactttatgcaacagagctgttgtgttctatctagtactactgttctagctgcatgattcatccatcaccattgacaagagtatactattattcccaacgttgttctgaatgttattattacgcagactactattatgtgatgctgggtcctctacgtgcatacagacgagacggcatgtcgtatgcagatgcagccacagaaacaaaagataaaatcgcagtaggcagcagattgattggctttgtcctcgcgcccgcagtctcctcgtccagaagaaaaggatatgcatcccatccagtactccattcccaactccatgactcaccacacacatgatgaaacgcgagggcttgcgaagcagcatgtgcagcaatcccgtcttttccgggcaacttgtgcatggatggagcccttggaccagcaattgggttgcacgcttgcacgacgcacaccgcaccatacgcccccccgggcaatgtttcaaacagaaagtctcccaatccgtctcgtcgtctcgactcacgttgaatctcgccgcgcaggcgccggtgcaagttaggcgtcgcggccacacgcgcgttcacatcgcgcgcgtcggcgccggagtcgcctgcagaaaactggagcccaaccacgccctttcttctgtctagcgctgacgaagaaaacgaccgtacccatctcacccacgcatcgccctgtccattttggcttcgttcattggactttgactctcgctgaattaatgtggaagtatcgcatgagtccaaagaatcaacgttttctgaaagctgcctgctactactgttgttcgttattctattccatcatctaaaaaaaactactgttgttcgttttcggatgtaccagcctgatcattaatctaaattaatccggtaagaacgggatcagttgacgtgacgagatggggtgacaacttgacattacactgtataagtttaaggtcggagcgacgtaaacgtaatggtaacatacctaatctctagtactatagcttaactactgtgtctgtagctaatgtgtctccttcagaagaggtactaacttcactgctacctccgtcccaaaatattgatgaggaaaagaatattttgcaagagaggcaaattagaatactgcaaaacaaggcgcaggattaggagaccgtcagaattattcaactaaaatggcgtatggatttcactggtcagtgagtaggacattttggaatctctgatgacactagagatgattaatgccaagcttacgtgagccttaccggtacaatgttgccactgcaaaatcaaaggatgggtcggctagattcagagaaaccgtttggtgtgaataatggcagttgagttacaggttgatctagaaaccttttttctcctcagaggatagacatgtggactgtaaccacatagtgagtaaaaagaagcccttctttctaaagtcaaaattacagcgtttggtctaattcagggagaatatcattatctgatctgcaatcactgagtctaaacaaactcgatcccctccttaacgggcttaactccttattataaaccatgcgtgcaccatcatcagtccatctcctaagcaatcactgagtctaaacgaaatcgatggcctccttattctaaactatgcgtgcagcgtgcaccaccaatccaccatcagtcggctagataactcctaccaaatcttattgggaaaagcaacagtgtgttttcatttgtctttttttttctgtcagtgcatgttttaaaacaaaacgtgtcatcggagcgtgcaaagacagaattatgaaatctcaagtctgaacacccctccaaataaagaatccaatttgcattggagaatcaggagtatatctttctccaatcactcataatctggcagcgcaataattgcggggattccatcatcatctgctttatccatcaacctatccagtgtgtacccctcccctcccacgttcatggtgggggctcccacatcagtgtcgatgacaagagagaaaaagagaccatctaactgaaaatgcccactgcctgggcagcctggctaggtactcaatgccccagatgctctctctttctctctcaatttaatcgccaccacttttgtttctttaattccgggttagatcagattctcaatctgaactgggccaacactttgtactagtatatctatatagtgtacgtacatgcttcttctgaaaatggtcgagaacgacgagaagaacaaagaacctgggtttttggttccatcgctgccatttttttcgtcaggtcacggctttctccatcgactttatcgatgtctaacgggaaaaaaaacatcacaaaaaagtaaaagctgtagtacggtgctactactataggtgtggcaactggcaagccatgcgcgacgcgagacttaggacaaaccaatcaaagcatggcgagagaaaaaaaagagaaatgacgtaaaaacttatttaaaagagcgcaatgctatgttcgccggcctccggaattccaaccaaaacccagactgtaactgtgatggcaaaaagaacgtagcgtaaaacctactaccgtttctgttgagaagaattaacaaagagaggagaagaaactgaagtagaacgcgagcaggagcagtgaaggtgaagcgagctagtagctactcaccggaagagcgagacctggacgagcgtccccggccaccacatgtgcgccggctccaccacgaacttgcgcatcagccccgcccacccgtacccaagcacctaaatcatcatgctcggttaatcgcaagaacatgagatttctgatcaaatgttgcaaatctgaaatggattaggctgcaaatggtttgacaatattgcctaatgcctacctgggtggtgatgatgaggagccaggcggcgacgaaggagatggagcgcttgtagaaggcgcggatgatgtcgacgatcatgacggcgtaggcgttgccgttgccgaaggcgcagccggcgttggcgaagatggagatgagcacgtgctccttcatgttgaaggggcccgggttgaggctccactcgccgccgccgagcagcgcgggggcgcggaacgcgcggcgcggcagcacgcgcgccaggaagtggcccaccggcagcgacgccacctgcaccgtgatctgcgtcacgatgagcggctcggtgcggtaggagaagaactggttgaggaagctcaagagcgcgcaggagaggaggccgatgctccacatccggaacgtccacaccggcagcgccgtgtcgtcgccggccggcaccgtcagccgcacctcctcgatcggcgacgtctcctcctcgtcttccccggcggcggcggcggcgaggccgcgctcgtccgccgctgcctcacccattgcgcgtgacgcggggggttaatgcctcccgcttagctctgcacaggagagagagagctagtgtagcagagagaagcccgtgcgttgtgttgcgcttaccggagcccttttgaaggaactcagtcttagtacagatacagatggcaagaaccattgaagtagtagggtttttttttttttgccatactaaagagagtatatacgtgctaccttcaattaatactttcttcttctgaaatagtatgagcatttcctatgcacctggacgccgtttgcctggctatgtatatggacggccttatctgtttagccagaaatgcttatggtaataacttagaaagaggttaaaaaggaaacaattgatacacgttattatcctttccagacatatatgtgcatgcaggagaaacaattattgccaagcatgtatacctactaaaagaaatagaattaacttgagtatagaaacctgtaatgtatatccaaaccatccggctagaagatgtggccagaacattgatattttaaacattaaaacatttatggatgtaatttcatcccaattttttttaaaaaaaatacaacaaaacaatatacccattccaacggaataaatgacgtcagcatgattccacgtaccagatgtcactggtggagaaagcgtttgtagtcccggttcgtaacccccctttagtcccggtttccaaaccgggactactaatccgggactaaagatcgctatctttagtcccgggtgaaataaccgggattaaagataacactaaccgggactaaagatcgagctgacctttttttttgcatggccctgttgctgcatggtttatatatatgtatgtatgtatgtatgtatgtatatatatatgtatgtatatatatatatatatatatatatatatatatatatatatatatatatatatatgtgtgtgtgtgtgtgtgtgtgtgtgtgtgtgtgtgtgtgtgtgtgtgtgtgtgtgtgtgtgtgtgtgtgtgtgtgtgtgtgtgtgtgtgtgtgtgtgtgtgtgtgtgtgtgtgtgtgtgtgtgtgtgtgtgtgtgtgtgtgtgtgtgtgtgtgtgtgtgtgtgtgtgtgtatatatatatttacattaaagaaaatgtgtacacatgcatatagaaaaatagacatgtattaattacaatccattatgatgtcctagctagctacgatttcgatgtagcagtagtcgttatctcagaagctaaggacctatgaattgtatttccgtcgtagtagaattcacccttgggatcaaggatttgttcgttgatgaatcccacgagttgttcttgaaccgccgcgataaattccttgtgtgtgatcaggttatccctcatgcgaataaactatatgaatgtatgaaattaattagtaattaaacaacaaatcgatacgtaatgaaattttgaatttatttgtacatacatcgagctctcttgtggtgatgatttggtctgcaaggcagtggcaatattcgcacacgtagtagccgcacaagttagttccctgcttttgctttgcgcactataaataaatgacaaacggcgagagatctaattaatatacacctgtatgtatgtgaattggagattcaatataaatgtagagcatgtgtactcatatgaaaattgaacttccgcctaagtctttctctccatttgccgcggaccaaatgacggaaccgataccaagccctacatggagtttaaagctatgattcgtagtagcaattaattataacaagattcttaattaacataggaacttatgatagtacctgtctataagtttgaaaaccttgtcaaacgtagactcttttttatccattgagtcatatacgttgacggtgcaggcctccaggtcgaagagtaaaagcacctagtggaatctgcaatgtgcgtgggatgcattacatatgaaacacttagcatgttcgtacgggaatgcaatttggtataggaagatagtaaaattaaactaattctgtgttgtacggcaacagtatgaacgtcttgtaatgctgcgcctttaggagatggacgaaattgtcctctgtggcttgcggatactagtcgagcattgcgacgtttactttccgagggtcgatgaatctagtataaaaccccccgttgtcaggccctttgaatctccattctacaacgataaaaggaagtatatattatatatagtctacttatatacaaggacctaattaattaaaggaaacgtaataagaaatctaactgaacgatacttataaaatccagcaactcataatagatacgtcgagggcgtccagctggtatagttcgtagatacccttgaaattgatccagagaatgtcatctccttgcaagaagtccgtgtccctgatcctcgctccgatcatctctctaccggtggcgctcatctccatgtacagttgatggaacttgtacatttgtgtgggtagggactgcagctgcttaggcttgacaagcggtttaccgagtttgtacatgtattttacttccgccttttcgattggtgcgcctcgtagcaattgatccgtagttagcccggtgtcattaataaattcttgtattccaaaatcttcaccggtcaccaatggctcgatctcctggtttggttgctctccaagctaagggactggtttggactttctagaagatgctttcttgagtgttcactcatagtccgatagctttatggcctccttggcaggtgcagacatacccttgaagaagttcctgacactcgggtctataggaatcttcttttctggacttcgaggcttcaattgtctcctgacttctgatgacacataagcgtcaagctcctcttgcgtgcaatcgtaccccgggtccttgttcttggcggcgtcaactttcgccttcttcgttgcccttgtgggggcaggcggtggagcttggggggcccttgacttggaaggtgccggacgaggagcttgcggaggagtcggtgtaggagcctgaggaggagtcggtgcaggagcctgaggaggagtcggtgtaggagcctgaggtggagacggtgctggagcatgaggaggagacggtgcaggagcctgaggaggagatggcggagccggaggagatggtgcacgagacgccgcttgtcgcgcagggaggatgatgtaccgcttgcgccatagtataatggcgtggcttgtgtctcgtagatgcgtctcaccgtctagtccaggtaatccaactcgaggtcctcgtacgcgccttcgaccaactcaacttcgaccttggagtatcctgctggaatcggcctgcagtggtaagtacctgaagggtccattgggatgaccatgcccgacgccaccttcacgtggtgagaggttatttattagtaatcaacatatataagcagcaacttgcggaatggacaaatctaaaatctataaactacgagcttacctttattgataagttcttgaagggaatatgcagctcacatggtgtccgctgagtgatgtcatcaacggggcaggtggttttatcctgggtttgcatggcgtccatgctctgtgatcctacctgccccgttgaggcgcagctgctacgatttcctgaagggctcaccattgcaggaggaatggtcggctggtgatcatgggaccgatgtgcggccatgcgttcatcaaccttcattgccaccttctcttgcatgctgagctcgtagctcgataccctgtactcaagatctgcaatcttcgcctcggtatctctcttgctcctcatccgactcctgtacgtgtggatgtcctccttgaacccaatcttccaaggaatcacccctttccctcgtgttcgtcctggatgctctggagtctgcagggcgagtgacagctcgtctgtagcgcccgttccgtcgtggcgcctagcgggaaaattatctcttaaaaaccctaattgcgaaatttgtttctttgcttgttgtctagtgtccgtgccatctcaagatctcaatccccgatctatcgtcgagttcaattccgaatccaaatccttccaaaatcaattcctccgcaaaagtctattttgcctcccccgaggtcgatgggccgaatctcgctcggcccatcttcccctcttccccggcccatctctccctctccccccgggcgctctcccgctctctctctctctctctctctctctctctctctctcttccccgcccgcacgctgctcgcgcgtgcgagagccgccccgagcgcctctctccccgctcccccctccgccccgcccgcgcgccgcgcgcgcgtgcgcgggagtcgcccgcgccgagcgcccctcccctcgcgcgagctccccgctcgcaaagacgcttcccgcgcgccgtgttcgcgtgcgcgcgccctcgcggacgccgcccgttgtttcccgcgcgcgcgccgagtggccgaccgcccggtcgccgccgtcgtcagcgtctgccgcgcctgtcgccagtgtcgccgctccgctccaaaccgcccgccgtcatcgccgtcgtcaccgcccggcccccgccactccgcgcgcaagccgccaagggaaggaagctgcgcccctcctctctctgccgcgttgcccccgctcccctccccctttttcccgaatcggcaaaggggcaagccccctttctccccctccttttcccctttttcctcctcgccggcgtcatcctccctgtcgccgctttggccgcgaccgccgagcgccagctcgcgcccttgaccgccctaagtcggttcccaaaccgacattgccatcctataaacccaagcctccccctttcccttcctctcacattcgcctcctcaccgttgccgccgcccccgtgctctgtctcgcctccgccgtccatcgccaagcgccgggagagccggtgcgttcgtggacgcggaaggggactctgggtgctcgtctccttcctcttccccggcccgaggccggagagattactcccgcgccgtcggcctctcgtcacagcgcccctcctcttctcggtgatgtctctctccgttcttcctcctcgctccatctcctccccctagctttcggtagtagcttgagtagcctccccatagttagccggcgccgccccgaccgttgccgtcgctcgccgtgtgttcgccgccgtcgccgctcgagctccgtagaacccgctcgtcgccggcctcgctcggcgtagttccgcccaatccgacgctagcgtcgagttcccgaagccgcatagatgctctcaccgccgggaatcgacctctcgtgacctcgtcgccgtttccctcttctcccgccgccggttgccgccgccgcaatccgccgccgttgagcaacctccggcgaatccgagccgttggctcgcctccccttgtcacgtgcaaccgcccggtgtgctcgctgttgcccgtatcactgtggttcgctccgccgctcgccgctgtcgtccgccgtccgttccggccggcgtcgtcgtctacctcccgccggcccgcgtggctgccacgtaggcgccacgtcggcgccacctcggccgcgaccggatcagccgacccggccagccgctccctccgtttttttcccccgtgcgcatggtccgcggtgagccgtgaggctgcgcgtgggcccgccgcatccgttcctccgcgaaccgcgcgcgtgcaccgcgtcccagccccgcccgcgcgcgtacgccgcaaactccctccgcacggtgagccgagccgctgacaagcgggtcccacccgggaccgcgcgcggtgagcccggtccaccggctctctctcccctcccctcccgcgcgcgcgcttgggccgttttgggccggccggcccgttaagctcggccgagccgctccatttaccttaggccgcgccctagccgcccgtggaaaagtctgatttccatccctcttttcttttcttttcttttcttttcttttccaaaaaggatttaattaaatccttttcctttagaccaaaaatccaataatcttagaaattcaatatcttcccaaccgtaaatccgtttgactccgttcaacttccaaaattcctcaaatctcgagatctatctaatggcacgcttagaggtcattaatagggctttattttcgccgtttgttgagttgttccgtttcgcgtgtagttccggagcctgaagacccgcagtgcgaggatttcgaggatcaagctccagatctcgagcaaggcaagccacctttgaacatcttgagcctatatttgaaatttaattatgttgcttgaaaaatattatgcattgataggatcgcacttaatcttttgtcccgtctgcaagacagattggcggacttacctaaattgttgcatttgatcctttccttgttaattgttacagcatgtccccttgtaaccacctagttgcgtcttgatattcgtgcatcctgtgcgagtatcgacggacgccttcaaacttataatctgaataacaacttgggtaaaacttgggttttacgaaagatttggaaaacccgacacctgggtcggtgcttgcgaactaaatgaatttccaaaaccgcggaccggggaacgtaccgggtgtacggtttcccgctctcgcacttaaggaccgattccttggaatttcatccaaacataagacaagtacgaccacatgggtggaatgggacacccctggctgagtaactagcttatcaggggagccttgatgccgagagacatgtggattcgccggggtggtgtcggggaggacccctgggcttcctggcacagtatggtctgggacctaacctgttgttggtctgggacccctctcgtcggcatatggtaaacctgtgtcggctttcgaaatgccttgtcatgaaagcttggaggtctcccgacgtggctgatccccacgggctgggtgacccgggttagtaatgtcgtgtgggtaaagtgtaccccctctgcaaaggttaacaaactgttcgaacagccgtgcccacggtcatgggcggatgtgaggtgattcctagcgtagttttgtttgactactgtttgtgaaattgctgttgtgaaaaggggttcgatgtttgaaaaatctgcagctgatgggatcaactaggcccgggtggctgtttgaaaagttgtaggcccgggtggccgtttgaaaagttgttggcccgggtggccgtttgaaaagctgttggccgggtgccaaccctgtttcaagatctaaagactgatacattgcacatactccgaccggacgagacgcactgtcttatccgtgtcgtttgagaagcactcacttagttgtttttagaaaagagtttaaataaaataaattgcgaaaacaacagcctttccttgaagcctgcattaaacacttaattcccatggcttgctgagtactcccgtactcacccttgctctatataaataccccccccagttgctgaagaagatgaagcagatcctgctgatgaggagttcttccaggagcaagccggctacgatgagttttagggtttcggcctagttcccaagtcgcgcctgtgtgtttggtccaagtcatggcttccgtttcccttttgtaatgcagttgtgagctcgggatctgtccgcagcccaacatgactgtacctctactctataataaagagacctctgttgctgtgatattctgtctccctgtgataccagcactgtttcctgggactggtatcgattaacaggttaaattggagcgtcacgggctagttccggtcgggactagttcggggcgtgacaagagatggtatcagagcacaggcttggccctagggcgaaacccgacgcttaggacgaccctaaggatactaagttcaaaactacttgcgaaaagctaaggtttcttttattttctttattttctatagttgtttccaaaatggttactgatctttctccctctttcaaaattgtagatggcagtgaacgccagcttcagttcccacggttttggtgagggtcaccacgtcgctcagcttcgtgacctcgcccgtttccttggcttctcgtgtcccgagtacacggggtactccgtggaccgtgttccccctcactgtgagctctctgtgtacctttacccccgtggaggtatacacggagctggccttcgcccacaccacttcactgtggccaggcccactctctagatcgcgtaccaggacctctcctggactgcgcttcgtcgcctggtccatgactacagccaccgtctcggaggctccgccttccggcagcttccacgccttccttctggccactcagacgccaggtacccttgtccgtacagcgagtctcagccagtgctgactcgtatggtcgagctttcggaggctcaggccactcagcacgacctactccttgaggcttaccgctcccttgcccgccgctacgccgctttggaggcccgtctggccgaggagggtgtcacctcagttgacactatctcttgggactcaggccgcctctgccacgccagccacctgtcctcccatagctcccgcggctctgcccgcactcccagtggcccgcgttcccccagctcgcgtgcgccgtactcaccagtgtactccccctacccacacccagttagcccttcctacacccccgggcacaccccagttgcttcctcccgccgtggcccacgctttatccgcaccgcgcggaagcgtgttgttggttcttccaccgtgttccgtttccactacccagctcccccaccgccagcggcccgtgctgctgccggccctcgacaggttccgccgatcccttcgcgccagccgatcgacgtttcttcgactgaggagccgactacaggaggcagccaggccgacgaggagtagaggaggcagtcttcagcagccgtccgtgtgataggcccttttgttccgccgccaactcttttggagtcgtgcgaggtagtgtgtgcgtgtgtttgttgtgggtgttgtttggtagtctggttctcctaggtggtgtgcgcacagtcaagctcggcatagctctgtgacttgtccacacccgttgtatcaggtgtatttatgatttgaaaaatccagtttatgcctagtgtgtgctatctgagttgctatttactttgctccttgccctcctaagtgcttatctgactcttacctcgcccttttctgggagtttagatggctagccgcccccgccgtgcagcccgtgcaccagcccgctttggttttgaagatggtagagttgagccagaagaaaatcatgagtcggctaatgagcagtctcaccgcagcaaccgttcgcatcgcacagcttcccgtaatgcagaaatggaacagtcccaccgctctcaccacactgtcagtcacaattctggagaagaacgcctcccttccccacctcatgtggaaaacaacatgcaacacttaatggcagttcagacacaaatcttgcaaggtttagccgcagccgtagccggttttcagcataatgcgcatggaaatgtccaccttcacatgagcaacaatagatccaagctgacagactttctgaggtctcgtccgccagagttctctcagaccgtcgagcccgtcgaggctgacgattggctgaaagatgtggatagaaaactcaacttagtgcagtgtactccggttgagaagacgctctacgcctctcaccagctaagaggacctgccgcagattggtgggagaattactgcaatgcacaccctgaacccactaacattgcttgggatgagtttgctacggccttccgtgcagctcatgtgccggaaagcactattgacatgaagaaagaagaattcaacagacttaagcaaggcaacagcagtgtcaatgagtacctaagtatgttcaacaagttggctcggtacgcccctgaggaagtggacacagacaagaagaagatcaggaagttcttgaagggaatcgcagttggaatgagactccagttgcttgctcatgacttccccacttttcaacatatgatcaacaaagcacttctacttgaggatgccagaaaagaggctaccgaagaatacaagaaacgcaagtctaaccatcagggaaattcttcccgaggcgcacctcgccctcgctacggtcaacccatgcaatatcaccagtcggtaactcaggctaaccgccagccaggctacgcccctcgtcctcagataaaccgtccggcacctcagccacagcagcgtgcccctagtggcaatactgcgccaaacagtgttacctctttcaagtcaccacagggaccgtcagcagttcagtgtttccggtgcaaccagatgggacactatgccagacagtgtcctcagaatcctaccaacaccaactcagggcatgctaatggcagccctgccagaactcctactccagcggcagctcagtctcgtcctagctctcaggcaagtggacaaggttctcgtgcgtccaacaactttggtcgaggacgtgtgaatcacattcaagctgaaaccgctcaggatgctccagacgttgtgatgggtatgttctctgtcaactccgtacccgcaatagttctatttgattcaggagcttcccattctttcatatcacaagcttttgtgaaaagaaatggttggaaaacccaaaatttacgtgtaccaatgatagtacattcccctggaaggaatataagggcaactcaaatatgcccggaagttaaccttagagttgaggaagttgacttcctagccaaaccgatagtcctagactcgcaaagcttggacatcatcctagggatggattggttggctaagcacaaaggacagatagattgtgccgaaaagtccatcactttgcaaggacctggaggaaagcaagtccgctttacccctaacacccctaccgcaagtcggtctatcctaacctgtttacaagtcacctccttggagtcagtgcccatagtctgtgaatatcctgacgtatttccggaagaattaacaagaatgccaccagaccgagagattgagttcgccatagaactggcaccaggcactgcaccaattgcaaaaagaccctaccgaatggcagctaatgagttagcagaggttaaaagacagatcgaagaactggaaagtaagggttatgtgcgacctagctcatccccttggggagccccagtgcttctggttaagaaaaaggatggctctgagagaatggtaatcgactatagagccctgaatgaagtaactataaagaacaagtacccgttgccacggattgacgatttattcgatcaacttaaaggagcaagagtcttctcaaaaattgacttgaggtcaggttaccaccaattgaaaatcagatctgaagatattccgaagaccgctttctcaacgcgttatggtctatacgagttcacagtaatgtccttcggactcaccaatgctccagcattcttcatgaacttaatgaacaaaatctttatggaatacctggatcagtttgtcgtggtgttcatcgatgacatcctgatatactccaagaatgaggaagaacatgctgaacacttaaggctgataatggaaaagctcagagatcatcagctattcgctaaattctcgaaatgcgagttctggttggaccgagtagcatttctcggacacgtgatctcctccaacggtgtcgaagtagatcccagcaaggttgaagctgtacttgcttggaaccctcccaagaatgtgtcagagattcgcagcttccttggcttagctggatattatcgaagattcattgaaggattctctaagctagccagacctatgaccgagctgttaaagaaggaaaagaaatttcaatggtctgtagcctgtgaagacagcttccaagaattgaagaaaaggttgaccactgccccagttctcaccttgccagatatcctaaaagatttcgagatcttctgtgacgcatcaagacaaggcttaggatgtgtcctaatgcaagaacaaaaggttgtggcctatgcatccaggcagctcaggcctcatgaagccaattatcccacccatgatctcgagttggcagccgtggttcatgctcttaagatctggaggcactatctaatcgggaacagatgtgaagtatacaccgatcacaaaagtcttaagtatatattcacacagaccgagttaaatatgagacagagaagatggttggaactaatcaaggattacaatcttggaatccactatcatcctggtaaagctaacgtggtcgctgatgcgctaagtcgcaaggcctatagcaatatagctcaaatacggcctgaccaagatcacctgtgcagagaattggagaagttaagactgaccgtggtacagtcaggtgtccctgccagcttgacagtacagcctaccctagagtcgcaaatccgggaggctcagaaagacgacgaagggataaaagagttaataaaaagaatacaggagaagaaagacactaatttctccatagacgatcaaggcacagtttggtgcggtccacgcatctgtgtaccggccaagaaggagttaagagatctcatcctaaaagaagctcatgagtccgcctactccattcatccaggaagtacgaagatgtaccaagatatcaaggcatacttctggtgggctggaatgaagcgagatgtcgcagaatatgtagccttgtgtgacatttgccaaagagtcaaggcagagcatcagaggccagctggtctgctgcaacccctaccgatccccgagtggaaatgggaagagatcggaatggatttcatcaccggtttgccaagaacccctagcgggtacgactccatctgggtaatcgtggatcgactcacgaaatcagctcatttcgtgccagtgaaaaccacctatgatggaaggaaactagcagaactctacatgacccatgtcgtatgtaggtttggttgtcccaagaaaatagtgtcggatcgaggcactcagttcacctcaaggttctggaagcagttgcatgaagctctcggaactgatctaaattttagtacagcctaccatccgcagaccgatggtcagacagaaagggtaaaccaaatcctagaagacatgctgcgtgcgtgtgccttggatttcgaaggcacttgggatcgttgtttgccgtatgctgagttctcatacaacaacagttatcaggccagcattcagatgtcgccgaatgaggcaatgttcggaagaaagtgccgcactcccttgtgctggaatgaggtgggcgaagcgctggtattcggtcctgacatactcaagtcagcagaagaacaagttaagctaatccgagaacgattaaagacagcgcagaaccgtcagaagaattacgctgacaatcggaggcgtgaccttgagttcgaaaaaggagatcatgtatacctgcgggtatcacccctccgtggtatgaagaggtttgggatgtccggcaagttagcaccccgctacatcggcccctacctcataaccgccagacatggcgaagtggcttatcagcttgagctacctgaaggtctcgcagatgtgcacaacgtgttccacgtatcccagttaaagaaatgtcttcgagttccagaagagcaagttcccctgggtaatatcgagctggaaaagaatctgacctacaaggaaagaccgatcaaggttcttgaagaggcagaacgtcagactcgaaggaagaccatcaagttctacaaagtccaatggagcaatcattccgaagacgaggcaacctgggagcgagaagatcttctccgcgccgagttcccggacctgctcccttaggtgctgaatctcggggtcgagattcttgttaggggggttggtctgtagcgcccgttccgtcgaggcgcctagcgggaaaattatctcttaaaaaccctaattgcgaaatttgtttctttgcttgttgtctagtgtccgtgccatctcaagatctcaatccccgatctatcgtcgagttcaattccgaatccaaatccttccaaaatcaattcctccgcaaaagtctattttgcctcccccgaggtcgatgggccgaatctcgctcggcccatcttcccctcttccccggcccatctctccctctccccccgggcgctctcccgctctctctctctctctctcttccccgcccgcacgctgctcgcgcgtgcgagagccgccccgagcgcctctctccccgctccccccctccgccccgcccgcacgccgcgcgcgcgtgcgcgggagtcgcccgcgccgagcgccccttccctcgcgcgagctccccgctcacaaagatgcttcccgcgcgccgtgttcgcgtgcgcgcgccctcgcggacgccgcccgttgtttcccgcgcgcgcgcgccgagtggccgaccgcccggtcgccgccgtcgtcagcgtctgccgcgcctgtcgccagtgtcgccgctccgctccaaaccgcccgccgtcatcgccgtcgtcaccgcccggcccccgccactccgcgcgcaagccgccaagggaaggaggctgcgcccctcctctctctgccgcgtcgcccccgctcccctccccctttttcccgaatcggcaaaggggcaagccccctttctccccctccttttcccctttttcctcctcgccggcgtcatcctccctgtcgccgctttggccgcgaccgccgagcgccagctcgcgcccttgaccgccctaagtcggttcccaaaccgacattgccatcctataaacccaagcctccccctttcccttcctctcacattcgcctcctcaccgttgccgccgcccccgtgctctgtctcgcctccgccgtccatcgccaagcgccgggagagccggtgcgttcgtggacgcggaaggggactctgggtgctcgtctccttcctcttccccggcccgaggccggagagattactcccgcgccgtcggcctctcgtcacagcgcccctcctcttctcggtgatgtctctctccgttcttcctcctcgctccatctcctccccctagctttcggtagtagcttgagtagcctccccatagttagccggcgccgccccgaccgttgccgtcgctcgccgtgtgttcgccgccgtcgccgctcgagctccgtagaacccgctcgtcgccggcctcgctcggcgtagttccgcccaatccgacgctagcgtcgagttcccgaagccgcatagatgctctcaccgccgggaatcgacctctcgtgacctcgtcgccgtttccctcttctcccgccgccggttgccgccgccgcaatccgccgccgtcgagcaacctccggcgaatccgagccgttggctcgcctccccttgtcacgtgcaaccgcccggtgtgctcgctgttgcccgtatcaccgtggttcgctccgccgctcgccgctgtcgtccgccgtccgttccggccggcgtcgtcgtctacctcccgccggcccgcgtggctgccacgtaggcgccacgtcggcgccacctcggccgcgaccggatcagccgacccggccagccgctccctccgtttttttcccccgcgcgcatggtccgcggtgagccgtgaggctgcgcgtgggcccgccgtatccgttcctccgcgaaccgcgcgcgtgcaccgcgtcccagccccgcccgcgcgcgtacgccgcaaactccctccgcacggtgagccgagccgctgacaagcgggtcccacccgggaccgcgcgcggtgagcccggtccaccggctctctctcccctcccctcccgcgcgcgcgcttgggccgttttgggccggccagcccgttaagctcggccgagccgctccatttaccttgggccgcgccctagccgcccgaggaaaagtctgatttccatccctcttttcttttcttttcttttcttttcttttccaaaaaggatttaattaaatccttttcctttagaccaaaaatccaataatcttagaaattcaatatcttcccaaccgtaaatccgtttgactccgttcaacttccaaaattcctcaaatctcgagatctatctaatggcacgcttagaggtcattaatagggctttattttcgccgtttgttgagttgttccgtttcgcgtgtagttccggagcccgaagacccgcagtgcgaggatttcgaggatcaagctccagatctcgagcaaggcaagccacctttgaacatcttgagcctatatttgaaatttaattatgttgcttgaaaaatattatgcattgataggatcgcacttaatcttttgtcccgtctgcaagacagattggcggacttacctaaattgttgcatttgatcctttccttgttaattgttacagcatgtccccttgtaaccacctagttgcgtcttgatattcgtgcatcctgtgcgagtatcgacggacgccttcaaacttataatctgaataacaacttgggtaaaacttgggttttacgaaagatttggaaaacccgacacctgggtcggtgcttgcgaactaaatgaatttccaaaaccgcggaccggggaacgtaccgggtgtacggtttcccgctctcgcacttaaggaccgattccttggaatttcatccaaacataagacaagtacgaccacatgggtggaatgggacacccctggctgagtaactagcttatcaggggagccttgatgccgagagacatgtggattcgccggggtggtgtcggggaggacccctgggcttcctggcacagtatggtctgggacctaacctgttgttggtctgggacccctctcgtcggcatatggtaaacctgtgtcggctttcgaaatgccttgtcatgaaagcttggaggtctcccgacgtggctgatccccacgggctgggtgacccgggttagtaatgtcgtgtgggtaaagtgtaccccctctgcaaaggttaacaaactgttcgaacagccgtgcccacggtcatgggcggatgtgaggtgattcctagcgtagttttgtttgactactgtttgtgaaattgctgttgtgaaaaggggttcgatgtttgaaaaatctgcagctgatgggatcagctaggcccgggtggctgtttgaaaagttgtaggcccgggtggccgtttgaaaagttgttggcccgggtggccgtttgaaaagctgttggccgggtgccaaccctgtttcaagatctaaagactgatacattgcacatactccgaccggacgagacgcactgtcttatccgtgtcgtttgagaagcactcacttagttgtttttagaaaagagtttaaataaaataaattgcgaaaacaacagcctttccttgaagcctgcattaaacacttaattcccatggcttgctgagtactcccgtactcacccttgctctatataaataccccccccagttgctgaagaagatgaagcagatcctgctgatgaggagttcttccaggagcaagccggctacgatgagttttagggtttcggcctagttcccaagtcgcgcctgtgtgtttggtccaagtcatggtttccgtttcccttttgtaatgcagttgtgagctcgggatctgtccgcagcccaacatgactgtacctctactctataataaagagacctctgttgctgtgatattatgtctccctgtgataccagcactgtttcctgggactggtatcgattaacatgttaaattggagcgtcacgggctagttccggtcgggactagttcggggcgtgacatcgtccttctctctgtcaggtcagaacgtgccctgagaagaggcttccactgcatccgttagtcgacgcgcagcctcgcgtatctgatcgctgaagaccagggagacatcaactgggttgagcgttccaccgtgagcatagtaccagaacttcgatcgatccagccatttagcggtggccggttcgataccccactcaagcaagcttgcctccatctcgtcccacttcggcatcgcgacgctatagccgcctgaccccaagtggtgatggtacttcttcttggcggcattttctttgtttctttccatcatcgcctgcccttgttgacctgtcttatatgcaacgaactcgtcccagtgatcccttagctttgggaatgtgtcgaagttcggtgtctgccccttcaggatatatttctggtacagatctcccttgaagctctaaaatggttctgccattttctttagagtccaccttttcactttgtcctctgtacctgcgggaagggtgaatgtctcgagcattgtggtccacagcatctctttctccgaatctgggacaaagctctcatgatctccgcgtgcccttgttctgcgccagtacaccgtactgacaggcatgttatcccgcacaacccaaccgctgtgtcgtacgtagttcttgactgcttccgccggggcactaggtcggccgtcttcgtccacttccgttatgaggtgccgaccctcaagcttctttgcggcacctcgttgcccgcgtgccctcttctgtccagcggagggttgacttccactagcctcctcctcctggttcccctccacatccctctccacgtgcccctcctggttcccctccgcatccctctccacgttcccttcctcgttcaagtactggtttggatcctcgttcccctcttcttcgttccagtactggctgcttccctccgcgattgtatcatacaatatctgttcctcatcgcgatcagccatctgttcatacaagaaatagttgctaagtctataagtcatttttgctttaacaatcttatatgctaaaaatcatatatgctaagtctaactgtcgtatatgctaagtctaattacaaatctaataatcttatattaaaactataataatcttatactaaaactcaaataatattgtattaaaactgtaatagtcaactatgttaagtctaagtgacgtatattaggaccctagtcaataattatatactaagtctaattacaaatctaataatcttatattaaaactcaaataatcttatactaaaactcaaatagtcatatatgctaagtctaactgtcgtatattagaaccctacacaatcttatatgctaagtctaattacaaatctaataatcttatattaaaactataataatcttatgttaaaactcaaatagtcatatatgctaagtctaactgtcgtatattagaaccctacacaatcttatatgctaagtctaattacaaatctaataatcttatattaaaactcaaataatcttatactaaaactcaaatagtcatatatgctaagtctaactgtcgtatattagaaccctacacaatcttatatgctaagtctaattacaaatctaataatcttatattaaaactataataatattgtattaaaactctaattataatgctaagtctaagtgtcgtatattaaatctaatagtcttaattgcattaaaaatctaacaatcatatatttacatcacttgcctgcgcgaattccttcgagggctagctaccactccggcttgagggacgacgacgacaacgtcttttctgcaacatacaaaaagatgtattaggataaacgcaaagtaacatatattgtatttcacgttcgcgttctcgttaagttcacatttcattcacgatcgttcacgttcgcgttctcgttaagttcacgtttcattcacctacgttcattcgttcacgtgcgttcacgttaacgtacgttaagtaatgttcacgtttcattcacctacgttcgttcgttcacgttcgttcattcgttcacgttctcgttcacgtacgtttcgttcgttcacgttctcgttcacgttcgttcgttcacgttcacgttcttgttcacgttcgttcgtttgttcacgttctcgttcatgttcgttcgttcgttctcgttcacgatcgttcgttcgttcatgtggcagcagcggagcggcggcgtggcggcgcggcatcggcgtggcgcggcggcggcgttgcgtggcggcggcgtggcggagcggcggtgccgtgtcgcggcggcgtcgtggcgtcccggcgtgtcgtgccgccgcggcttcgtcggcactgccagtgcgatgtcgtcgccggtgccggccgcatcgaggtcggggtcggcatcgtcggcgcagcggagtcgtgttcggccacgacgacgtcggcggcggcgtcggcaacaaggcggccggcggcggtttggggagagagagagagagagagagggaggcggcggcggctctcaccccagagatgcggcggcggtggaggcggcggaggcggcgacgacgatgagcgcgagacgacggcgagatacgacggcggcgtcggcgcggggatgccctaggcagtggcggcgaaggagaagccgagagagatcgatcggcgaaaaaacttctaagtgttggtggagaagacgagggcgcgcatcgggaatatatatacccctagatctttagtcccggttgttctgaacaactaggagtaaagatatctttactcccggctgttctcatcaaccgggactaaagatattttcccgctatttccaaattctttttaaacccggttagggttaagaaccaggactactgataagcgtactgaatattaatttccattacatatgtgtttctaaaatggactaaagatattttcccgctatttccaaattctttttaaacccggttagggttaagaaccaggactactgataagcgtactgaatattaatttccattacatatgtgtttctaaaatagaaaataatgcatttaaattatttaaagtcgtaaaattaatgacaattacttcgaaaaattattgttgtctgtagtaaattaagtggataaaacgtaataagcaaatatatgatttaaaattaataaaaattctaataatcatatatacttagcatatgaatgatattaaattattaaaaattgtaattaacatatgtatatacatacgacatgcatgatttaaaattaataaaaattctaataatcttatataattagcatatgaatgatattaaattaattgttaaaaactctaattaacatatgtaaatacatacgacatgcatgatttaaaattaatagaaattcgaataatcatatataattagcatatgaatgatattaaattaattgttaaaaactctaattaacatatgtaaatgccacatgcatgatttaaaacttttaaaaatcctaattatcgcatataaatagcatatgcatgatttaaaattgttaaaaactctaagtaacatatgtaaatgccacatgcatgacttaaaacttttcaaaattctaattatcacatataactagcatatacatgatttaaaattgttcaaaactctaagtattatatgtaaatgccacatgcatgatttaaaacttttaaaaattctaattatcgcatataactagcaattacatgatttaaaattgttaaaacctctaataatcgtacgtaattaacatatgccatacaacaattgatttatatggataatcaatacatccaaaatagcttaaatcatgtacacaataattacggcaatacatcggcggtgacggttgaccgcacgtactttctcctcactattgttcccttcttgtgatcgctacgtgagtaaggggtgtcttcatttgataggaggatgctagggtcaatcatcaccgtgaaagggggttgcccatcaaactgatcataatcctcgtcagtcttgtcctcaactccgacgattttcttttgcctgagagaaccacatgacgctttggctcgtcaggccctctgcccttctttcctttgctagacatgtccttcacgtaaaagacttgcgttacatcattgacaaggacaaaaggttcgtccgagtatccaacctttttaaggtcaactgttgtcatcccactgtcatcaatcattacgcctccaccagtcaacctaacccattggcaccggaacagagggaccttgagaggaccatagtcaagttcccatatgtcctcgatggcaccgtaatacgtgccagttgttccatcgtgtcccatggcatcgatacgaacagcgctgttttggttcgtgctcttcatgtcttgggctctcgtgtagaatgtgtaaccattgatctcatatccctagaatgtcgcgatcgacccagatggtcccctcgccaggaaggccagatgttggttgatcgtctcgttacccatgagatgttgtcgtagccacgcgcggaaagtatcaatgtgatgccgtgtaatccatgcatcggacataccgatgtttctggcgagaactagagccaagtgctcctcgatgtaaggagctaccaatgaagattgttgcagaaccgtgaaatgggttttacggaataaattgttgtctaccgtcattattgctttccttccgagagttccctttccccgtagtctcccttcatggcgtcattcaggtacctcgattgggcaaaggtcttcaataaattctacgcaaaattcgatgacctcctctgttccataccccttggcgatgcttgcctctggacgagcacggttacgaacatacttcttaagaacgcccatgtacctctcaaaaggaaaagtgttgtgtaggtacacaggtccaagaatactgatctctttgacaaggtgacaaagcagatgcgtcattatattgaaaaatgaaggtggaaatatcaactcaaaactgacaagacattgcaccacatcattttgaagggcttctaatctatccggatcgatgaccttctgcaaaattgcgttcatgaatgcacatagctttgttattgttgcccggacattgtctaaaaggataccccttattacaactggtagcagttgtgtcatcaacacgtgacagtcatgagactttaggtttgtgaacttcttctccttcgtgcttattattcgcttgatattcgtggagtatctagacggtacctttatgctctcgaagcattcaaatatactttccttctctgccttgctaagagtgtagctggctggactcaagtaatggcttcctttctcctttggttccgggtgaaggtcgtcgcgttgttccatatgcttcagatcattacgtgcttctagtgtatctttcgactttccatatatacctaggaagccaagaaggtttacgcaaaggttcttagtgaggtgcatcacgtcgattgcgtggcggacgtccaagaattcccaatagggtaactctcaaaatatagagttctttttccacatcgccgcgtgaccatctttgctctctataggctggcttccaggcccctttccgaacactactttaagatctttaaccatagcaaacactgttttcccgctgcgatgtttaggcttcgtacggtggtctgccttatgttcaaagtgcttgcctttcttccgtaccgggtggtttgctgcaaggaatcgacgatgacccatgtacacaaccttcctacagtgcttaagatacgtactttctgtttcatccatacagtgagtccaagccttgtaccccttgttggactgtccggataggttgctaagtgcaggccaatcgttgatggttacgaacagcagcgctcgtaggttaaactcctcctgtttgtcctcgtcccacacggggacatcttccttcttccacaacagtttaagatcttcgaccagtggtcttaggtacacatcgacgtcgttactaggttgcttggggccttgaataataatcggcatcattatgtacttcctcttcatgcatagccagggggaggttgtagatacacatcgtaacgggccaagtgctatggccgctgctcatctctccaaaaggatttatgccatccgtactcaaaccaaaccgtatgtttcgtgcgtcctttccaaagtctttaaattctgcgaaccatcggcggggtgtctcagcatcccgtcctattgacgctcttcagcgtgccatcgcatcattctagcattccccttgttcctgaacaaacgccctagccgtggtattatagggaaataccacatcaccttagcaagaattctcttctttgttagctgcccgtcaacttctcctggatcgtctcgtctaatcttgtatcgtagtgctttgcaaacaggccatgcttctaggttctcgtactcctcaccgcgatataggatacaatcattcggacatgcgtgaatcttctgaacttccagtcctagagggcagactatcttcttagactcgtacattgtctcgggcaatttgtttccctccggaagaatgttcttgacgagtttcaataaatcgccaaatgccttgtcactaacaccattttttgccttccattgcaagaactccagagtggtatccaactttttgtgcccctgctcgcaacctgagtacaacgacgttctgtggtcctctaacatcttgtccaattgatgggcccctttttcactttcgcagtcctccttggcgtcctgcaacatctgaccaagatcatccgcaacgtcgttaccatcagcatccctttcctcctcgcccgtttgatttccttcaaatccaacgtactgagcaaagtccggaatattgtcatcttccacttcatcttcttccatttcaacactttgctctccgtgggatgtccaacaattatagcttggcatgaaccccgactcaaacaagtggaaatgaatagtcctggatacagaatactccctctaattcttacacttattgcatggataacaaataaaacccttatgcctgttagcttcggccactctcaaaaaataatgcacgccgtcaataaactctttggaccgccggtcagcgtacatccattgccgatccatctacatgacatgaaaaaaaatcgtacacaaataattattcttacaataatgatagtcatacaataattataaaataattacaaactctttcaatagtcatacaataatgacatatcattattcatacaaaaattataaaatattacaccaaataattcttatttactatttctaaagttttaaactaatattaatgtgttgtacttcttttaattttcattttagtttgttttctattatttaagattaactttcactatattttccttctcaactattttataaaaccttctttagcaaataaactaaatttctatatattctttcttccccacacaaattttctctctcatcaacttacaactaaatttcggagacaaaaaagtgtgcaaaacatagctccaaatgtaatatgacaaaaaaaacattggaggatgaagttgctaaccttttaggcacctccgatttgtatataatcaccaaaataaattcattagaaattttggtatgacctcctctcttttttgaagaaattttaaagtttgctcgggcagctggagaaggaagaagacatatacatatatatatatatatatatgtacatatatatgtatatatatgtacatatatatgtatatatatgtacatatatatgtatatatatgtacatatatatgtatatatatgtacatatatatatgtatatatacgtacatatatatatgtatatgtacgtacatatatgtatgtatatgtacgtatatatatgtgtatatgtacgtatatatatatgtatatgtacatatatatatacatatatatatatatacatacatatatatatatatacatatatatatataggggtgggactttagtcccggttggtgttatgaaccggggctaaagatctccgggatctttagtagttacgataccaaccgggactaaagatcccagggaggcctgacatgccctgacagcatttgaaccaggactatctttagtcccggttggtttaccaaccgggactaaagatcaaatatgcccgttaccctttttaaccgggactaaagatcatctttagccctgatttttattgcaaccgggactattgtgtaatttggccgaccgacgaaagatggtttctccaccagtgtgtggtacttacaatgtgccatgtatgttatcccaatatcaaatctgcattaatttgtctagttgtaatttgagttttagatattttaagtgagattatatctctacttattttccttacagatggttgtcactataaatatcaagggcaaatattatttatttccgtcttaaaatatccagtatttccgtgcgtggaccgtgtgtatctgtgctggctttgagcatggaccgtgtttatgtgctatagctttgctgtggaaagtgtccatcgctgatactctggtctgggctctggctggcagtgggcaaggagcgtcacgtgtgctgcagtgttcataatttttcataccaggcacgtcgcgttcgctaattggctgccatttgcgaccaggatttaaagggctacagaaatgcaatatcttcttcttttatttttttaaagaaaaaactggaatctagtggcgctgaatgagaggcttggagctagaggtggatgcaaggattcacgtttccaaaaaaaaaaagaaaaagtaaaatttcaaggtttcgacgtgagacgaaagcggattttcatgagaattttttaatgtttctaaagaattcaaatttaaaattgtaaattggagcaaaatttatctagaatttgttataatattttcatacgaggtatagatcctgcggtctatgatcggaaaggtaaaccttggacgcttccatcacatcattccattccatactcgcttctactgccaactttcgtgtgaacgcggtcccggactcccggtgcacacggccgctagctacgaccctacgacccacgatgtcatcacagtgtggtatgtacgcatcggcgatgtctgcacgctgatcggccggtcgaccagcgacagcgagctcacagcgtttggtttcggggttttttatatactggcggcacgcacgctgcagctgcagaccgggatctggacgaaagcaacaaagtagtggtaacggggtaggtttgttttacctcgacgcgcgcgagatgcacgcttcttggatgtaagcgtattttaatctggaccgggatttacgcaggaaggtggtgcaaacgcaagtgatctccttcggtaataacagatgatgatacggtcaccgtggcctttttctagctgcggatgtgatgcgctcatgcgctgaatcgcagtattgcgcacgacgccacgacaagggttgctgatgatccccgcaggtggtcgtcggatccagagctgctgctcattttcagcgcaggcgtgtgcatgcttccagcgctggatggcggcgctgatgaccgataattgagggggttaggactagtcggcataggatggcggcgctgactctctcgaactgtagtgaagaatacggcaaagcattttacagtggctagcagagctggagtgctggaggatgaggccggcatggattaataatcccttcgtccggagatttcctttttctttttttcgttttcgtgcacattgaatcatttgatcatttcctttggttgctgtggaagtggtgtggaaatgggatggtgaataagcccgattcgacaatcgacacgcaaatgatcctctcgcacattcctgcttatcagtctactctcgcagaatcctgctatcagcctgcatacatcatatatggagaccaggaagggaataagcagggaaggcaaacatgcaggttacgcgttgtcaataaatttcggtatgtatatcagctttcagatagataaatggagtggcaagattgatctctcttgatgatcatgtgttacttaattagcaaagtttaagctgctcaatactgcaatatgcacgctttgcacacagcatacataaggattctggaggcgcagtacgtaatagatcgttatatatggagtactcttatatatgcctagttgcctacagacattctgaacccagctgcagaaaagctaagctttcttttcttcatgggtcgcgggagatgcatcatcagccgttttcaagaactgctttgcaaacagtaatccgctgcagaatctggatgttgaatcggttacgctgaatttactagagtcgcaccgcacgaatgctcaacaagaaaaacacagccaccttttccatctgtagatctacatcaacaacaaagccaaattgaagagaaggaaaagccacagaacagacaaaaaaaaaagatggcacttcaaagttactatgtatgcaggaatttgtcgtcataaaggttgaagctaagccttacctttgttttgttttattttcgtgtattcctccgcatgaggtttgaagtctaagtacttggatatgttttggcggtgaatatagaaacgggatggataaaaaatccattatctaaaaatacaaactaaaagttaatcgaggattatccaaagttcctatgcgtgcagactaaaagtgaatcaaagactatcgaaagctacttttgtgcaggctaagagtgaatcaagtattatcgactcctactcttagaggagttatattgactattacatgtagaagatgagtttgtattcaggagtagagaagtatgattagaaatatctctattaagagcaaatatcgtggaaagcgaaaatttttattcccactccgtcgacattaatactctgcaggttacaaatgcatgatgaagatatcaagttaataaatgatgaatgtcgtaaacttgagacgacaattatgcctctatttgccaacttcgggtggaagttttctaatagaattcagtagttaggagatctttttcttctgttggtgtctattagtttgtgtttgcttagctttgtttctgctatcattaactttctgtgtgagttatgtaataattgattgtagctctttgagtaaatgccagaatgttacattccattatctaaaaaaaagcttatagagaagggaaagaaacaatcagcatcctttctaaaaagagaaatccaggccagacatgttggaatgacacttcacaatttacaagccggaaagtacttgagtaacacaaaatcacaaatcatgccgaatctaattcgtatccataccggatatcttgacccatcatttattaaaaccactgcaatttgactcccacaatggttttggaggacagtttcactaacgtgacgtctatgtgatggtgttaacctggtctttgtcccacgtgacgttgatgtggcgcttatgtgagattagaattgaaaaaaaaatatatgagactcatttatcattgacaacaaaaattgtgaaacccaccgacatgtgggcccacatgttatcccctctctcccttctctcttccccttcgcctgcccatcacaaccggagagagaggggatgacatgtgggctccatatgtcggtgggtgccacaatttttctgaatgacaaatgagtcctcaatataccttttttttaattctaatgtcacataagcgtcgcgttagagttaggatgaagatcaggtcaaccctgtcacatcaatgaaaccaacctccaaaatcatagaggagtcaaattgtatcggtttttattaggggtggcaattccccccgcggtgccggtcccctgcggggacccgccctcgggtgacatttttgcctcacgggtgcgccggggccagggccccgcatttgtgcgggtgaggggccggggggacattccacccacaggtgacccgcggggccccggggggtatatgacctcttaaaacatagcctattagaggcccaaacagtccatctcagtccaagtcatatataaccagcattcctaaccctaggtccctagccaactcctcccagaagccagcgccgcacgcccgcacctgcggatctcgccgtcccctgtcccctcccctccggttgccctctccaccgtcccctcccctcctttccggcggcgtggcggcgacgcgaatgcacggcgacggcatagcacacagaagttgaaggctgatactctaaacggtatttcttgattccctaattagaacaaaatttctgatctgagcttgtgtgtcacatgtgtgaagtatgtacaatatttttccttgctaaattaacgatcgtcttgtacgttctgtgctgatttgatgaagttgctactcacagcgggccccggtcaggttgcggggccccgggtgcgggggctgatttgcacccgcatgtccactcggggccgggtgcaggtgtaagggtcggggctcaggggtggggccgttccagcctaacctgtctccgccccgccctattgccatccctagtttttatagctgaggggtcatgatatccgctattgcgacaactgtacggaatagatttggccactagttaagggagtcacagtgaacttattcccctacgcgggctttcagaacgatcgagacgccatgtgcgtctcagacggtcccgcttcggcctgttcgccgaggcggcctcgctctcagacggcctagcgcgcatgtcccaggcgccgaggcccgaagcgctgccgcgaaccaaccgcgggtccgtggctactaaactaggcccagtctccgtctattcagagcaccggcccaagccgcggtggacagggtggtgctcgcgcgcgccgtcacgcgcggcggggcgttgcacgatgagcgaatcgttttaccgtttcgatgaacctttcgtgcgcgcgcaacaacgcgacactcatctccgcgggatcccctgcttcgccacgacgccacatcccgttccccgaagaaactgctcttccgtgaggctacaaaacatcgcggcgggcgagcgtgtcagctgactcgatgacactcggcaaacgcacactatgccattctaccatcactacagagcccctgtgtgtgtgcttgctggggtgttgtcgtcgcctagcgggcggcgttaatgatggagcaggggttgcgaaaggcccagttacgtgtaatccacgtaatggcactatgacgagctgtccaactgcgagctgcttcccggcactgtttgcacgctcgcacatggcacagctgtaggattagtggcaaccagctgcacactcacactcacactcacccgttgatcctatcctatctcgagaaaacgtccccggctaagttgttaagcatggaccatcacggtcgtcatattaagcatcgcgtcaatgtattcatcaccagttgttccagaggaaatgacgaccagtacgcatataggcagaagcttctaatgccggatgcttaacaatgacatgctagctgctgaccatgtgccatgtggtcttcagctaaacgggtatatatgggatatactcgtgtagacgtatacgtacgctcgcttgtattctttgggcgaaaggaacgtgacatgcacggggcggcgtgaacaaatggtgcgggtaggcagttttgtcgattgtcagtgattcatcagggagcttcacatgatgcctttccgatgatttaaccgggggattaagctgctctgggaaagccttgcgcgcgaatgtggggttgatagtctccacatgctgttgctctagctgccctttgattcgtgtgcccagcccgaatccgatttctgaaatcttatcatcttatccctgctctgcaaggtaaggtcaggaataatgggcaattgggcatctccatgggaaaaggtggaagaagagcagatcatgctgggcagtgtcacggtaaataaatggtggcaacatagatattactagtactaccagtacataattaacgtgccaagaacgagagggaggaaccaggaccggagtagcatacataatttatgcccctttacatttagcagccatagtagttcctaatatttagtttttacctttgttttttctcctttgtgtattttgtaaccaaaacttcttttcttttaatatattaacgtgtaaattttttacgtgtttgtgaaaaaaataattaacgtgtatctggcattgacaggtactaccacttggaggttaaatcgctggaggcgaaacggaaactaacaagattagcgtgctgcgttgttgcgtccacgaaacctgctaccacagcagcctgagtcgtctatcgtgccaacagatttcggcgattggtaaccactaaccacccatatgcgacatggggccatgtcgtgtgatcgcttcttttcagaaaccctgctagggcgtgggctcagatgatccatcgaacctgactaaaaaccctattgaaagttgaacgatctgaactgtagctacccactaactcatgcagccttttgttactccttgccacacccgtgaaaccgagcgatgcttgtctctcgcttctctcattgaccacgcagcagtgcacctacacgtgaccctgggcgcgtaatttttcacacccccacttgcagaaacagacgaggcggtttcacaggttctcttaccccatactcacatctacgatgtctaaatactcccactaatacccacacccatcgcgggtataaaattatccccatacccacacccgtgcggataacgggtatccaacggatacccatacacatataattgatttgtagtatttatagttttgtactataattagccatattagagttgtaaaccatcaatattttctctagcaacaatgctattaatattagtgttaaaaggcgagtaaaaaaattatacaaccacattacataattaagaaatcaaataataatttcatatagctagactaagcaatactttaagatgtgaaaggagttttatgctataatttagtagtcgtcgagagttatattgctcatagttttaggctcaatgaacgggttttttctacccacgggttggtgggtacgggtgggtaaagaacatacccatatccacgtatctaatggttaagagttttcgcccgttaatagacccatagatataagaattagaacacaattagtttctaatagagtaaaaactcgtcgggtcttgagttatgggtacccattgccatctcttggtgcaaccggagcaaaggtcgaagcggccaatggcgaggcgagggcgcgagaccccgcgaggcgtcgccgctgtagcagtttgacgctggccgcagccgcctgcgtgcgcgtgcttgtgtctaggcgtttttggggacggcgcacatgagggacggggacccgtgtgtcgcactgtctcgtcgagtcattggtcgaatcatgtgtatgcatgtcctctttgcggccgttttatattgggttcttcccttccggtcttggcggcgggtcggataattaactccgtatacttgatttagctttgggccatgtcgttcaactgttcgaagtgtatgccggtatgccgctgactgagcacctgcatctccatgtgatcgatcggtggttggcagagctcggcatggcccgtgggcggccgagacgatcggagatacgtgttgccttttgcgttgttactgctatacgcgtaccccatccacatccagccggagaccgggaacaaaggcgtttttacaaggcttcagctacgtcgaaattagaagggctgatatctacttgaatttgaatttgaattggtttggtttgtttcggtgaccagcgtccacggctcaaagcgctctcttgcctggcacggtggcgcatgctgcacgggagcaatagcaggaagcagcaggacaaacggtcaggaaaagcagaacgccgcgattgctgtacagctggtgcatggctggaaatgttgtactacaacgcgccataccggcaggtgaaaaagcgaatcggacggagtaaatacgtgcccgattaatccggaggtcaggacaacgcagcttgctggctcaaccgctcacgcacgtcaccttcggagtaacccaagttatggcgcgttccacgtaaaacatccaaaaacctccgcccctttttcccggcttccccccaaactggcaaacgcgtcacatgagttttacctaccaatgtttgcattattgggtgtacattgtgcaataccgaatttctgacgagttgaaacaggacaaggcaacgggaaaccccaagtagctaggtccatgcctcttcccccatcaccagcaaagcttagctgttggttacccaccttctccgttccccattgcctggttaagctgataaacctctctggctctcaatctcatcctttcgtctattccttgcagtcttgctctgattagcagtgtgggttttttcgcacaggagggccctacgcagcactagcacaaaaccaactcagcatgtgcagtgcaacctagcgaaagtggctgcacacatcagattggagtaggatatatggaggagagtatctatctgtgcgggaggctcctaccaatagtggtaccgcgtatataacacgacagcgtgggttcttgggcagcgcgacgccagggagcgcgtagggagagaaaagttcggttcttgagaaagaaaggggaatataagtgaggaggcgagagccagagatagagagagagagagagagagagatcggagcagctagctagagcatcaaaagcggccagccatggcgttggaggccaggttctttttggcggccgtgttcgccgtcgccgcgacgtgcttgtgcttatcggcggtggcctctgctttcgccgtgccgagcgtcgccttcgacgaagggtactcgccgctgttcggcgacgacaacctcgtccgctcgtcggatgataagagcgtccgcctcttgctcgaccggcgctccggtgcgttaatccccatcatcttgcaaagctcatctctctctccttctcgactggatttcgcctgcatcccctgctcatgtgcaccattagtatgagtcttcgtgttctgttcgtcatgttcttacggtacttgctgtctgcgtctatctgcaggttctgggttcatctcctcggattactacctccacggcttcttcagcgcgtccatcaagttgcccaaggcttacacggccggcgtcgtcgttgccttctacgtgagtgcctgcctctctcaccactgctccgatctgagaacattccttacactcctacccacaaaatccgcgttgtttaggttatcttcctgcggtttgttttgagccgttgctgctgttgcctcctcacatggcgtgtcaacccggaattcagctagtactacagtagtagtacaaaccatagcaagttgcgtaccagccccatgccctggtggcgcagggtagacagcagggcgagccacatgggctgtttggactttcaagcccaaaaaggctgcgccgcctgcacccgagaataaatgtacccctctcatgtcacgcgcactcaacagtcagtcaccagttcaaccaccattgatcacccctcaccaaaacgtacttatactgaattagtcgagcacgacgcgtacaacaacaggagtactcctaccagttagtctccgtgaatgcacgggtcacttaatacaacgccgtggtagatggaatattcaacggttccgtagttttttcttgcgttgcaatgcaggtgtttgttccaactaacacattatggctttcgatcgatcctaacggttttgttcgtgtacgtcgtcatttgcagctgtcaaacggggacgtgtacgagaagacgcacgacgagctggacttcgagttcctgggcagccgttggggcggccagtggcgtgtgcagaccaacgcctacggcaacggcagcaccgcgcgcggccgcgaggagcgctacctcctccccttcgaccccaccctcgaggcccatcgctactccgtcctctgggcccccacccacatcatgtacgcgatctctctgcactattcaatctctgcaaactgagctgaaccgagctttgggcttacggaatggatgtgcatgcagattctacatcgatgacacaccgatcagggaggtgatcaggcacccgggcatgggcggggatttcccgtcgaagccgatggcggtatacgcgacgatctgggacggttcgacctgggccacggacggcggcaagtacaaggtgaactacaagtacgcgccgttcgcctccgagttctccgacctggcgctgctcggctgccgcgccgacccggtgctccgcgccccgcgcgacggcggcggcgccgggtgcgccgagcccgacctgctcggcctcctcacggccgactacgccgtcatgaccccgcggaagcgcgccgcgatgcgcgcgttccgcgcgcggcacatgacctacaccgtgtgctacgacgcggtgcggtacgcggccgggccgttcccggagtgcgacgtctctgacgtggagaaggagtccttctcggcgtggggcgagtccaagaacgtcgtcatgaaggcgcgtggccgcgggcgccgccgaggacgcaaggccggcgccggagccatgtcgcgcctcgacgtgtccagcagctgaagtgtcaacttgggaagctaatggcatatgatggttactattacactactagattctattaattttgcggtattgattgattaattgtagtatggttttccatgtatgtatagtttgtaaaggtagtaggtgctagggattaagttcggtaccaatttcgactattattctttgattcgttggatggcagccaataatatgatatcaccggattatattactcagaagattttgttcggcgtaacccataaacgcatatcgtcgccactcgtccgtagtaggccataaggtattgatagcgtgtcgagaagcataatcacgtacgagattcggtgttaaaagtgacgggacaaggaacggaccggacgccgtggacaactggagatgcttgcattttcgtcgcctgtcacgcggagtacagtaacacctgtgtgtatccgaggcaaataccacccgggaaaggtggcccggcccatgatcgaaaaaccactacaggacggataggattcggaggcatttaagaatgcctcaacttgcactaaaaaaagtgttggatatactgctgtagggaaaaggattttaaggcactttttcaaaatgccttcataagtatagatgaaggcactttttaaattgcctttacatttgaggcactttttagattgcctttatacacatttaaggcatttggacttgtgccaatagttttttccaaggtattttaacatatgcccctaatttattttcaaggcatttttgacaatgcctttacttttctttttaggcactttattaaaatgcctcaaatagtacaatacatgcatatacaggctcatcccaccatatgaatgttttaacaggaaataacataacacatcacatatatctccaaaaacaatatagaacaataattcccaattccaattcaatcgcacattaagtggttcacaaatcatctcaatggtaattaagtttgtaagatatgctatcacaatcaatggtatgtttatgatttacaagacaataaacatcattgatctactgagtggcttgctcctgtcatcctgtgaggctcgcatgtatttgcaatgaggaaaaacaacctgagaatggattacaccaaaacctgtccatgcatttggacctgcaaaagaaaaacatgtaagtttctatatcaattttcaatatatatatatatagacacacacacacgcacgcgcgcgcgcgcacacacgcgcgcgctgcaatatatacatgttgcattcaggtgcctatcgtatccatgctacaaagtcatgttagacatcatcttgcacatggcgattagagggcaaagtggcaaatcacaacatgagaagaggtaaaccaacatcttttcatccaaccttgcagggcaaagtatgggaattaatcccggccataacataacatccattgccatcaaaatataagaaccggtttcatagtaattcataacataccatgcatatttcctattattacacaaacaagattgagctcatgaactatagttctttaagaataaacagatgcagctgcaacacctacaaagcatatcactaggattaatattcatttgctagaattcctttactcattaatcacctaaatataatgcattgtccacatattattgcaaaaagaattaagagatggagagagggagtgaggggcaatttacttgagctagaaccgggaagttgttaacagttggctattggtgaagttagcatatggagaatcgggtctggccttcccaatcttctttgccctagaatgtgtatcttcacgtcctatattcttctttggtgttagatcatgcacctctctcttgtgtccaacaacactttgcagtgcattatcaatgctattgtgcttgaacacctcagttagtgccaccgaatttccttggttagctgagttatgtctcgcaatagtcgacaccttaaattgagtgaaaatcatatttaacatccagattaccacatatagcaatatcactctaattttgacttaaatgtactagtaacaattagtgaaatatgcagtaccttagagtgtagagcttgaccacttggatgcattagctgcaatgtaattttaaaaaattagttgcatgtaaataagctagacaaatgaaataatagcatcatacattgtcacgtggccatgggatgcatcgagcttgagcacttcctaacttgctgatcattccatatgcacgaggtattatggtgtgctgattgaatacaatgttaacaaggatgtcaacacaatcatttagtgcctggccatcaacagaaatagcgtttttgtcggtcttctgaatggtacctagagcaaccatttttccactttttggagatattaggccaactttcataccacttttcaagatagcttttgtatctaatccagcctaaaagaagagatatagcttgtgagtctttctccttttagctagttcactagtaaaatgcaaaaaaagcatacctccagcccttcatggagtggtgtatgaaactgtctttttctgttttgtagattgggttcagatgaagttggtttctttgatttctgttggacagcatatgaaggtggtatattctccttattcaaatctagccgaggggatctaaacttcttttttgttgaggaggtgatgtcacttgaccaaaaggctactcattcaggaaaataacatatcagtaacaattagttgtatcaaattttaactcaagcacatatatgagatgctaaactgttgcatacctctgactgtttatgcaattctagatgaggagatctaaacttctgtttttgctgaggaagtgatgtcactttactagacggctagtcattcagaaaaaaaaagattagcaacaactagttgaactaatttttaactcaccacatgtattaaatgctagattgttgcatacctgtgactgtagaagtgttttcttgtttctggatgaaagtgatggtgcttgattgatgcaattcataggatccagttccttgaattaaaaaaagatataagatttatcaggtgcaattggtaattgtcaaagctataaaggacgatgggatggtatagtaaataaaaaaggaactcacctccaactgatttttagctggtgaattagacacctgacttctattcataggtgcatgcccttgggaagctagcaacatactttttaattcctcatattgtttttccagcctttcattccgtgccatcatcaaggtctgatttgctgctaatgtgtccaccatatccaaagctccttgttctcctgtttagtttcttctagttgtgcgatagcttcagctaggtgccttgaagccactccacctgctagcaggcccatgccactgttctttctagttttcttccttggaaacatttctgaatatagatcatcatctcgtgcctcttcaccgatatgagcagggttttcctcgatccttcttttaatcctttgttgaaattaacaaccatacatggttatcaatcatgaaggatacttgtacaatcagcaagcacatatgtaatttttttaaagcaaaatagtacacttgtacaaatactagatgagaaatcaggaaaagagcatacaattttatcactacagtattcatccaagggttctccatttcttttggtatgagtaattacatagagttcagcccgtccaacttttctgttctctttaagctcctgcaatgatatgacaatgctatagaatttgcagttgcatagctaaaataatttgaaaggccatacaagcaataaaagtaccgtttgatcaagaacaactgcaaaacctcgtgaaccagtggtgtgagttccattgagttgcaaggatctagtagctttattcctctctgacttgatctataagcaagaaatataacacatataagattaaaaaatctaatcagatatgttgttctataatttatttcaaacatgtacttatttttggcaagtatactttacccgagctgcttcagtcttccaatacctcaccaaccatgcccattgttttatagggattctttcttggcagccattaagtacattttgtctccatgataactcagaattgaagtacattctcttcaagacagctttaaaatctttccactttttgctagctgatttcaaaatccaaggtttgtaatgatcctcaatgtcaaaaattccctgtaatatagtgttgttaccaccacattacatagttgtttataatgtaagtgcaagtgcaagattgttaaagctgaggcatacctgaacagatgtccaaactttcgtcttgcttgcttcaggtacctttctccaattctttgcagccaaggatacatatttgcctttgacaagagttccaataaaattggttaatttgcaagtctttaatccacaaggttgaccatatcgattgaatttcaatctgatcttctcattgggatcaaggtccttccatagcgatctcatcattgtggggcctcttccacttttctttgtactttctagcatttcttcaaaataaaatcagaactggaccttcatgttcaaaactaaaattcatgtccattacatgttaatatgctcaaaaactcaccatgaacttgaccttcatgctccaagtcagcataaggtggcaaattgtccccaggttcagtctcatcataatcttcagagctacagtaatcttcatagtcatctccctcatcggatcctccattgcttattatgtcatcttcagtttgaaagttgtgttcatatgtgtatccatttgcatcataaggcagattgcaactatgtgttgtagattaacaatgcagcataaaacaacttaggacagacattcagaagtgcacatattcagattaacctgcaaatgtgtcattttgtttggatgccaatggcattgcagcatgaaagtttcttgatttaaactatcattaaaaacagcaacaaagttcagttagcaatagaaatgagaaaacccaaggagaaagtacaagtgttgtgtgataacctttgttggttggtgatcaagttctctgaattggataaggcgaattctataaatttatcaaccccgatattatattcagcactagatctagatgttttcatccaatccttatccatggtaaattcaattaatattacctagtaacatagatgaaaatacagattgcaccattagtttataataatactaaaatatggggttaaatgaatcactgataaataatgcattaatgcctatgcaagcatctaaaccatctccacatccagctcaacaccaaacatctactaaacagttcagttccattcaccaactaataaaaatcttttggtaaatataagagaccaaaaaagtattttatgaacattatttcactaagcataaacaagctagcacaggacaaccttgtaaaacaccctaaaaacacccaaattgggtcagtgtgacaaatgagaatatagtactatgggtagatgtgtatcagtgcatttagacaatactagatttttttttaaataaatattctgattcatgcataaataactgttattcatggaaaatcatttttctgtgtcaacttgtttagattcagattatttgcatatagtgacgtgcttttggttgaaattcatcaagaacagtggttggtcaggctattgtagtatattggaagttggattgtttgatctacaggctgcactacacccttttgcatgggaatgatttcaatcagcataatacatagatctcaacaaccgcatgtaaccaaaatattcagtttgagtaatattcagattctccaaatataatacatcctataatcatttataatacgtcctataattttctacaaccatagatttatatacaggaatgatacttctgcaatatggtacttaggaagttccatgattcacaacagaacaactggtaactccaattttctaaattaactaatactaatgatatcgaatggtgatttcacactctagagcagactaggattaaaaaaaatatttaaaatctcaaactgcagggtaaaaaaacaataatagatcatatataaggagattctccagtaaaacattatgtattctagagctaataagtcaaaatagatcgattatctcatgaaaaatcaaagtatacatcacatattttagttcatatactcacagtataaaggcagcaacggtagatcccaaggtggctcggctcgaccaggatgaagaaagtggaggcgcgactccggatccagcagggagagacggcaccgggactggagatggtgccggcggagggagcagcaagcgcccccctccccccgacgactaccctagcttgtttgaggcgcaagtgatctgcaagttttgggcatggaacgggagcgaagcaggctggtgtgtgtagatctggggagtagagcggcggcagcagatggcggcggcggtggcggtggcggcggcggcgccgcccggagtcgcaagcggcgatggatgattttttttttctagcgttttttcttctctcacgcgatctgatcgagaggataaggtttcgtatgtggtggatgagcacgtgtggtggaaggactattttatctaagtgaaattcttttagggtttttttgcatatataacagttttggaggcatttctgttccaaatgccttcgtttgaccaggcaattttgcaaaacgcccagatagtatgaaatattacggcgtttcatcatagtgccggtgatagataatttttctaaggcgttactgaaaaatgccttagaagcactgagtttttgaggcattcataataaaagtgtcttcagatgacagacttttaaaggcataaactaaatttgccttgtaattaatattttttgaggcatttttatcaaaattgccataaaaggagatgatttgaggcagttttagataaatgccttcaacagaatgccttcaaatgcattccatcctgtagttttagataaatttagcgttagagcctaaattttatctggactcgaatgtagccgagccccgtttgcccacccacgccttcaacaagccagccggtccggcccaaaacatttataggccggatggcctttgcttagcccagcggctccagcgtaccatccaaatctccacttccaggcggaatttggctgccgcgacgaacagcgcgcgaaaccacggcaacggtagacaaggatcccacgagtcacggaatcgcactgttccttcgcaacgaatcgcgtcgctgattctcccggtcgacatgaacgtctctcgccggacgccgaccgcggcgtcaccttttcctttccctctcgtcccttcttttcccctacgcacttgaccatcctgttgccggacctgcctgtgcctgggccacagcctcagaccaaccaaccaaccagcgcctgcctgtacacgagcacaggacggcagcagcagcacgagaggtagcagctgaacaacagccacaccctatactacttctaggtcatcacccccagagtgctcgttgtcgcgaacttttgtgggtttagctcaaaagaacgtagtgcgaagacgacgacaacaagcgagaccggccaagacaactttttgcacggcgtgtctcaacctccccaaagtggaaaaaagcacaacgccacccactgttcacgaggggcctcgaggaacaatggattaggcttggggaaaggaaagaaaaaaaaacctgtcgaattattttaggcttccggtctcctctcctcgaagagaaacgaggagagttaggtatggttgtgaatctcccggtgcatgtagggcctgtttggttgggtatttcaacttaccacacctcaagttagcacatgtcaaaagtgtggcaaacttaatccttgccatagttttggctcaaaaatgtgtggcaaagcagcaagaagctacctaactttctttggcaggctaaactataaaagcaaaacaaacagggctaagtagttgtggctgactaagatgaggtgcggcattctgtggcatggatccaaacagccccgtagtacaaattccccacgccacagccttctgtagcgtagcgtagcgatcgcctctccattttctggtacagacttgagatttcttcttcgttttcttctagcttatttttttgtttgttcaagcgactcaggaattgtcgcacgttagacttgggatttggtcaatcatacgccacacgtgttcctatcaccccccgtgctagcttccactggaacgaaacgaagaactaatactaatcccctggagtgattgattagctggaaatcctcccatgacaatgagtgagctgaatcttcaggtgcaactagtcctactaagcttcgactgctactacgtgtcacgaccttaaaaaaacatgagttcacatttttgcatcgtccatttacatcggcgtcttcgctcgagcccttgagagcgatttttcttttgttatccaccctgcagtttttttttttttttttgctgatgagtcgctttaggtgtgtgtgaaggcaattattccccgaatcagtcagacacatctatcgtccaatcagcctacgagagctgtgatatcaattctcaagcagagacgtcaacgtcagagagagtctggatccatccatcgttttccgcacgcacgttttttaaactgctaaacggtgtgtttttttgcaaaaaaaaaatctatacgaaagttgctaaaaaaatcatattaatctattttaaaaaaaacaaatattaaattaatcacgtgctaatcgctgctccgttttccatgccagggagtgaggttcagcctaaccttgttcacttgcggcagcaattgggtagtgccaatttgactgatcgtttcactgttttcatatcttgattggttttactaaattttctgcatcttgaggtttacagaccatcgtgcgattgtttgttaggctatcaatacgatataaattgaactggatcagttttttttttctaaaaaaaggaattgaactgcactgaatatttatcctggagtacagttggaaaccggagatttcacaacaatcaccataggaacaattaataacaaaaattcggcactccaaagcttgaactcagcacaaattgatgtccctcgtgcaacgaacttgttggcctaacatctactgagtcagagggcttttagctaggttagttagatgatgggagactaaaagttttcagttctaaaattggtacctcagtcccatattatagctgacctcctgtccttcattttagtttaaaccgcatagcatgatagcaagatatccgtgggctatggccaagccagccacatccctgtcatacaacactctgcaaagatgagaggaataagcaaaggacagtgaaaaggatggtactcgcagagacgaccaagcaatactaatatctctcaactaacgatgccactgttagggttctagccttctacacctatgatctcatgatcagatccaacttgtcattgttttcaggaactttggtttcagaaaggaaaggcatgcgtggccaaaccaagaaaccacagtagtacgccggatcaacaggtcttttaatcatactaaatcatatgcaaacaagttgttgcaacagtgctgcaggtgaccagagagagagagagagagagagagagagagagagggagagggagatgtggatggaacaagtggaaagtttctgctgatgaatagaagcaaaagtcgtctatggagcttttgctgggagtcaggtgaacagtgtacttattaggggataaaaggaccattgcattacttgctaccgtggcaatggacgctattaaacaccaaaagcttccttttggatttcttttttctcactggatgccagctcgagtacacatgctcaattaataaagcaaagggggaaaaggaaaacaaagaacaacacaccagatgcacagaaataccactagctctcgcagctcaattattcccaaccatgtcatctcctcttactcaacgtatggaatcttccgtggttttataggacaaaaccctactccaagcaacaaaaaaaaagtcattacattttgggagaaagctacccatcggacgtccaatacccatcaaaaaatcggatggtcaaatgttacagttgaccaacaagtaaaacattaagttatatatggtgaaacaaaaaaatcagcaactgaaatatttaaatattttataaaacatggtgaagatacacgttgaaacatatcgctgtcacgtatgaaacaaaaagtattaacggattgaaacatatatttttcctttatcaaaatatagtcatgcgatatcttgttgtaaagatttaattaaaacaaatacaatggtgtgatcggatcatatattgcataagtaatttaagagaaaaatcattttgaaacttagtaaaatacatgcatgtgtgtatggatgaggtgaagagagaggagggagagagtagtagcaggtagtatcaggaattttgtgaaacacactgaacacgcacattgaaacatatcactatcacgcatgaaacatttagttttaacggtttgaaacacatttttttcttttgacataatataatcatatgatatattgttgtaaagatttaattgcaacgaatacaacggtgtgatcggttcgtagatcggataagtaatttagaagaaaaaaatatttaaagaggaggtaagaacaaaaggaaacaaatgggcatggatgttacaatgataggatcctatccatataccgatttgcagtagatagcgctataccaatttgcagtagatggcgcgtccgatatttcggttttgatcggacgtaggatataaagcatttccctacattgtgcccaccactcgaatagtccaactatgcgccagtactactgtactgacccctctaatcaccgggaggaatcgaagtactaactgaccttcaggattataaagctaactcgtacattttttgtcgtgccaaaggcacaatcaatcgtgtaattataggatctgagtagaactcgacctgttacatcaaaagacagaaagctagtgctctgtgattcacgtgggactaaaaactccatcaagtcaaactctcttctttagataaactgttaatttacaaacgagttgctgctttctttgaacggagacgtggccaatctggcaatgcagcaggagggaatccccagagttgttgccaaaatccggcggcagccaatgatgctccgtgccgacaagccggttttcgtccaggatcgcgatgctagcttgctcgcgatcggctgaatggttcttcgacaacttttgtgcgtaaagcatccccccggccccgggtggtctcgcgtcgcacacaacatgcttgggataccaacatgtgggaaagaaggacaacgtgctcggggggtggtaatacgagatgcttcgctttctctttcgacgtgtcgttgtcgcgccgccttcgcgcaccaaactcaacaagttcagtcgccgttgctgtgggagggatggctaggctagaatgcggcgggtgctatgcttgcctaaaagaatgaaaagaaggggtgatgtgttgtgtaggatttgcatgttgcatctgcctactgcaatgcttatgcccaattttagctccgccctaagcaagtagtaagtgtttgatgctgttgcacatagttctagaacattccaataagggagcttatgttctcatatagaagtacagcacaagaaacaaatatgggtctgttctgttgcaagagctgtagcagcattgtagcctgtcggaacaatgaagcaagcacaaaaaagaaagaaagaaatataagcatttttaatattcgacacagtttttgagatactactttgattaacaatatctataaaggtaaaatattttaaattaaaaaagttgcatattataatagtttgtttgatgataaatctagtaacatcaattttacatgattgagcttttttatttttttattaatagtcaaagtttcaaatgtttgacttgacactatgctaaccgtgtttatattttaggatagagggggtgctacaaaatctatagtttttgaaaggaattgaggaattccatagtgttcgaaaatcttcagtcatataattcaaacgaggaatttagtcctcttttaaatgcaggaatcttatatcctatataaaatcaccggtctctaaacttgtaccgctgtgtcatcccggttcctaaactcgcaaattgaccgtttaggttctcaaacttgttcgactgtgtcatcccggtctctaaatttacagatcactcgtttagatcctccaacttgttcagttgtgtcaccccggtcctaaacaggatggtctaaaaactttatatcaaaaaataattcataatttttttatgtgaactctaatgatgacaaactttatattaaaattgtagctctcgacgcgacctacaactttgtggttgaaaagtttttgaagtaaaactgtttagggtcccaaaatattgttgcatatttatagattttgaaattttaattttaaaattacattttgggataaaaaaatgacttaaaataaaaaaaaatcaactacaaagttgtagatcgcgtcgagagctacaagtttgatataaagtttatcttcattagagttcacatgaaaaatttatgaattatttttaaatataaagtcttttagaccgtcctatttgacccagatgatattcaaatccaatttttggtaccgggtgacataactgaacaagttggaggaactaaacgagtaatctgcaagtttagagaccggaatgacacagtcaaacaagtttaaggacctgaacggtcgatttgcgagtttagagaccggtatgacacagcggtacaagtttagagaccggtgatgaactttactcaaaaaatatatagaaatttccgcaaaatttgggttttaattctggccgagtttagttccaaaatttttcttcaaattttcaacttttctatcacatcaaaactttttcacacacataaacttcctactttttcatgacatcgtttcaattttaacaaaaatttcaattttagcttggactaaacacatcatctatcgaaaaagttgttcgggggggggggggggtatcaacggagtgctcgccacgcgtacagcgtgcttcccccacagtttccgaagccggtttcgaacttccgataactcggaacagtacagggggccgaccgattctttttctgattttggcgacgcaaaatctggctagcatctgatgtgaggtttgctttgtgggcccacttgtctgaacataaagtgatgggggaccttggtgtttgtaactaacctttccgtgccctccatacgtgttcccgttcccaaactaccccatcacaccaaaggtcctactccgtacaaagtggagtactacgtactctttattcggaaaactgttccactaataatcaatcttaaaccaaattaaccacaaatattgtactaccggtgcagtttgtttataaactagtggtaacaaatttatgctagatttacataaaaccagtggttaaaaatagactgtaatgccgattaatctgacatgggcagatgggctgtgctagtattgaccaagcaacaggggtagaaccgtaattgcacactctaggaagagacggtcccgtgacgacggcctgcaaccacaaccaccaccacctcatctaccagaaggaaaaaaaaaaaacaaaaacaaacccaacacgcgctaatccaaatctcctaacccacaaaataccagtgattagcacaaagcgccatccagcattacagcctcgggggtggtagttatggcgtattaatatcacccgcactttttttccctccccctcctcctttcctcgcctcgcctcgtctcgccgcttgagccctcctcctcctcctcatcgacccggctcctgctccgctcgccggagcgccgttgcgggcgcgtttcctccgcccgctccgcccgcagcgcgctcctccgcgcctgccgcctgccgcggtaggaaccggggcacctctctctcggcgttgcggcgggcgattcggagcggtggcgtcggcctcggatccggcggtggggatccggcgggaggctcgggaggggaatgtgggtccccgtttgaggcggtttcggtctgggaggctgcggcgagatgatacggtgagtgatctgcgggttgtggatggtgaatcgggaattgggggccgggtgtgtgggtggttggcttgtttcaggggctcaggttctgaaatgtttggtgttttttttttttgggtgggggggggggaattaccagcaataggtggatttgacgaacagtttgattcgttgtaataggatttttgcgctcgttctgcccctctgttgaggttgttttctctcggttttaggcggctcggattgctttgtttctgtcgaattgggagtgccgatgctacaagaattccttcttgttgttccgacggattacagtgcaaatccattcgtattgttactgtttttgcaccgaattgtggctattctaactgtttgattaactgagatggagttgctggtggttctagaaggtaatttcgcaattctccgcgcgctctgagttcaggtgttttttgaccagttcaattcagggtattaatttggttttcgcgtgattctcctggtgcctgtatttttaacttttggggagaatagtgtcttaatttgagtacagtgggttaattcgactgacatgtcttttttggggaattcgggctgtatttagtgtctgaactgtgcttaatatggtagaaatttcatgctagctctcgagcctgagatatttctaaattcaactgtttggtagatttgaccgaaatttttctggagggaaatagatttggccacctgtgcatgctatatttgctcatgtctttgttgtggtttcctgctatactacgtgaatttgtgggttcctgctatactatgtacgtgaatttgtggggtataactctaggtgctaaatttggcctccttacatgaactgatccggagggagttggaaaggaattttgacctgtatgaattgatttgacccaattatggtgttttgtgattgagatggtacgtagctgttgggttcccccgaataggatcaacaggagtgtgtgacttgttagcatcctactccatgtatttagggggattggtaccttactggctacagtggttttcatggtgtgaacaatcccagtaattgctcaccttttgtagaattcggtgtggcatttatgtatatagaccgccgtggaaaaggagcagtgcaatattccatttacacgagttcacatgagatgaaccttttaaccctgtccatttcactttagttaggcatattcatttcagtaggccacctctagctatattttagtaatatgaatataagtgcattaatcaggaggataatcacttagttatttttctttgtatgcagttcgagtggatgcccattttgttgaggtggagatacaaagcatgggtaccttcagctagtgagctcaggtggtgtagatcaaggtactgatgtctgcaggagaatggcggggaatgatgaagttgccctgaaacctgtttcatgcggggcaagattacggaggagttgtgatgcatcattgaggtttggagggtccatgagagacccttttttgaagcacaaagtgaagaagtttgatctatctagcctagattggattgatgagattccggaatgtcctgtgttttctccatcaatagaggagtttgaggatccacttgtttatctcaataaaattgcccctatcgctgcaaaatatggtacagtttcttctttttgttctttcgcgatatttttctcagttgcaaggtcaatggtgaagcagtgattttagtcagggcattgataatttggcaaaggtggtactatgattttttgaaatcaaggtattggcaaacacgaaagcctcttcaattgcaagtcacaagtgcaatatagtacagttaattactgagttttgtgtgacctcctggaaatagatgagccacgcatggaaaactgcattgcctaagaaaatctttttgtcagtggtggaagtctctagcctagattttttcacttatttattgtcttcactcaggtttctgtggttattatattgctgagactatttaaatttaccaggtatatgtaagattgtttcacctctctgcgcttctgtacctattgggcctgtacttatgaaggaacaaggtggacttaaatttactaccagggtgcaacctctccgccttgctgaatggtccaaggatgacaagtttgctttcttcatgagtggaaggtctgttagtctattattactgcattgctgtttaataagtgtttttatttatatttggatgtcatgtgaatatgtatcatcagaaagtatacatttcgagatttcgagaagatggcgaataaagaatttgttcgaagatactcaagtgctgcttgtcttccaccaagatatatggaagaagaattctggcatgaaatagcctttggcaagatgcagtctgttgagtatgcatgtgatattgatggtagtgcattctcttcttctcctaatgatcaactgggcacaagcaaatggaacttgaaggtatttccttgtttccttttacaaggcctatattttttttctctatttgcaaaatacaagagttgcaagtgaatatattgactcttttgcctgttttcccacaattattacataatctctcctgcatttataagaagaatctcactaaccatctccttgcctatttccaaggtgctccctccttcccaaaacatatgagtgttttcgatgaattaaggattttggtgaaaggtttaaatggctcactaatacatggtggggtgatggccattaataatagtattgggttgggtgtgggatggtggggtccactatgggtaaaattcaccttttacatgtcctaggtagctatattcgggacaatatttgaactaaaggtaatatttttggacggagggggtatttaagtatgggtagcatggtcattttaacaatttaactcatgtactcttaggtttgaaccttccttaatcattgtgcccactcaaaataagccttatattttgaaatggagggagtagttcttttgtttaccagtttgggagacatatttgagtaatgaaacgactgcactctgtgcttcccaagttctgtgctatttttctgcgtggcagcatttggcatgagcgttcacataaccaactgcacacttgcaatatcctcactcttgcaattaaatcttacccaagtataagtgtccatatcctgctatggtaatttgcatcattagaggatcttatctatcacatttgctatattgaactattggcatgttaaaaagttaattcttgctttgatccagagactttctcggttgccgaaatcaacactgcgtctcctcagagcagcaattccagtaagtggactgtattgatgatttcccattattttttatacctttatttatcttctgtgtttttttagggaataacggatccaatgctgtatattgggatgctctttagtatgtttgcatggcacgtggaagatcattacttatacaggtgcatgattaatatttgcatcatatttctgcgggaatggattttaatcccttgaggggatgttccctcatacacctttttctctcaaattcaatgcaaatggttgtgaaaaaaatctagaaaaatttgacaaatgtagagcatagtgacatctatcattccaccaaaaaatcaagttaaaactcaatctacacattgagaaacaaaaatgacaaattcaggtgtgaatagtgccaatactgttcatacgctggattttctttttaaatatcgatgtgtgagttgcgtttagacctaagattttgtggaatagtgtatatagatatatattgtatgaatgttgtcattttttttttgagatttttccataactatttggatggtgtttgaacaaatgagggacatacccttgaggggctaaaagagtttcccatatttctgctacctattcttttcgcagtgctgcacattaaattgaaattttctatttgttataatgtgagtaaatgttttgccagcattaactatcatcactgtggggcttcaaaaacgtggtatggcattccaggcaaagctgctccggattttgagaaagtggtatgtgagcatgtgtacgatcatgaaattttatcaggtgaaggggaaaatgcagcatttgatgtcattttgggaaagactacaatgtttcctccaaatattctgttgcgtcatcatgttcctgtctacagagctatacagaaacctggagagtttgttattacgtttccccgagcttatcattcaggtttcagccatggtgaggtttcgttacatctacaattctaaatgctgtcagtgatatctttatttaactgttggatatctcaatattatatttcatttaatgaacattgtaaaatgcaaaaacaactaccaggttttaattgtggcgaggcagtgaatttcgctattggagaatggtttcctctgggagcacttgctagtcaacgttatgcacttttaaagaggacaccattactaccttacgaggaacttctttgtaaagaggcggcacttcttgatcatgaattttctacctgtgattataaagatacaacaacattagctggagaaacacacagtcaacgctgtatgaaagttccttttgttcagttgatgagggtccaacatcgtatccgttggtcccttatgaaaatgggtgctcgcacgcattataaagcagatattgatgccacagttctgtgtggaatatgtagacgcgactgctacgtagcccacattatgtgtaactgcagaattgatgcgatttgcctttgccatggtaagattgtagtaacaccaagtgttgatattggctttatttgagttcatcatttttacttgtttaccttgttttgaagaggaagagattaggagatgcccttgcagttgtgatcgtgttgtatttgtgaggaaagacatatttgaactggagacattatcaaagaagttcgaggaggaaagtggaatactggatgcagtcaaaaagcaaatggctcgacgtgatggcgctagtcagcattctaactttttcgattgtactgatcatgaagctgagtactacccatactgcaatattcacatagatccatccccagaaatatatagcatttcagagacaaattttgttgggtatgacttgaacaatccacatcctgctgcatcaacagtaacattttcttttgtaccccatgagtattctacacaaagtgatgtaagtctcattcctgtgcttattctaatgtttatttactgtttttagcaactaaaaagaaactgatattatttttatatgtgcaggagtgtacaagttctaacagaagagccttgtctagctcttgtctcgagaatacaattacccctgaaaatgcaattagtaatgcttgccagttatctactcctgatcaaacatgtctgtctgacaaattggctgcacatgatactgatgattctgactgtgagatatttagagtaaagagaagatctggcctaactcctgagaaaagacacatggaagatggaacaacaaatttcactgggaatcaggtacagatatttctgtgggtgcttctcataagatgattaaaaatgcttactctcctaaaagtagatgtggtatagtatgtttgcagttagtgtgtacttgcgaaaattcaacagtctatactaacgtttcatgtctctttaccttctccaaagaaatacaaatgtgactgaagtgctgaacttcattccagaaagtgcttagaaattggttacttaatcttacaaactagatcaaggtgaattcgcagggggcatgattgaggtgaactgaaaagtgcttacaagatgcttctgatagacaccttcttgttccttgtggcaggtattgaaacggctgaagaaaattaatgcacatgacagacaagaacataagttacctgaactatcctgtggtgcaaggagtgaacctgtccatactgatgattgtatacattgtgttgacttcatttctgaaaatggagacgacttcatagctccaaccaaattgaagatgatacatcaactagatgcaaatattgttgaggatgaagttgcttccagccagaaatataatagttgcaactaccaatctccatctatagagcttgggccaaaacgcttgaaaattcgtggcccatcttttcccagcaggatttctgagctggaggtatcttgtagattccaggacaatgacttgggcagccagcatgctcgatgacgactgctaggccattggttctaacactacgtaagttaacaaacagcatccctaacttctggaagctgaaagctcctaccagccaaggtttccaaattgttggttggtcagctggtaacagatggctcagatttaattcttctgcgggcctccaatagaggcattgacatgggttcatggctggattcttgattttattgctgggccacatttgtggtagggggctgaaagcagtaggcagacaattctgatgtttttccactgtacatcttcacatacatctcctttcacctttctcgtaggtttttcactgtgaagaggttagtctactaccttaccaatttctttcattctttttgcacacatacacatgtacctagaatgcttaatcagatgcaaatatgaaattgatactgtagatcccatattgagtcagttattcaactttctactggtctttgatctcttcatgtaatctcaaatgatcaaattttcttttgtcattattggtaccggtacatttgtctccagatgtgttgataacttgatttgttaataaatcgattgatgctgacaggaaatcactagcactgattgtcatgttgcatatgcaacaaagtagatgctttgtgataatgtataatgaagaagcccatgtaaatgctcgaatcaatcatattctattgaaagtgggtgtaacagaaggaataaaggagctaattcagtgaggaaatcaaaatctgcacctaattgcatattcccatatgttggtcacgttcattacttcatttttccaactagaaaaaaattcagctcctagttgtttgatcttgatatactaaaaatctacagttagctggagattaaccaaaaggttgagatgaacaggtcgaaaatttacttagaaataatacaaatctgaattatccattgtttgtagtgacatattatacgttacgatatgtatgaaaggccatctttaaggtggtaaccaacaactatttattccgtaaatagcttcgatttgtggaatgaatctaatgctaattcccagcaagacttcaggtactccagggagaacgacttgcatgtcttttctatatgatgctttgacaaaattctgcaaattaggcataggccctgtttagattccaactttttttctttaaacttctaacttttccgtcacatcgatctttcctacacacataaacttctaacttttctgtcacatcattccaattttattcaaacttccaattttaacgtggaactaaatacagccatagtaataaattactatgttgtcatgatgggacaagcacactagcccgtcgcacgattatttgctttcacttacccatctcaccatcatgttgctccacctgctgagttactaaagccacgaggacttataggagccattaacttgacagtttggtatgattttgcacgactattatggctttacgtcggtaaagcggctattccttcatggaaagctcatgatgggttcatgaggaaagatttgatatcttttctaactttgcctattctcttttcattcttttgttggatgttctcaaaaatacatgtcatcaaatcatctcatgtctttaaagaagttaaaaaagaaggattctctttgctgccactctttggtgtccctgatgattaactgctgagtgctgactgaagctttgtcaagaccaaagaaacacttgtgcctgcccgtcctcttttctattctgccatcatgtcaacgtcatcccagtgataaagatccaatttcttgatttgcaagggctcggcattaaggcgaagatatgcatcatataaaatgtaagtgcgcccaaaatgccttcagattcattttacctagcttcttgtttatgaatattgttcaaagataaatgttctttgtcttaattaggaaaagactgtgggttccaatgtgtattctaattgaagaatgatcttaaaagaatcctgcaattacataatatttgcatacctttaaaaaaaataatgtttgtttatcggaaattgctgtatccaactaacttggttgaaaatccgttccaaatgattcttttccgcagttcattacttgattccatggtcattgtctaaaatgtctcgagactttaaggacagagcatacaacccacacttctatcattttcttattgtccaacatgctagtaactagtacgccttccgtccataaaaaaaaatctaatcctaacaacgaatttggacacatacttgttcagatttgtagctatagaatttgcctctttttgttagattagtagtactcctccgtctaaaaaaaataacctatgaggagatgtgacctctctaagtataacgaatatctcacatctcctttgaggttttttttggacggagggagtaactgattaggcatgtctacacggttttcttcatgtattagcctacttcctccgtcctaaaaaaaggcaaaccctgactttctgtgtccaactttgactgtccgttttatatgaatttttttataattcttattttcattgttgttagatgataaaacatgattaatattttatgcgtgacttgtctttttaattttttttataattttttcaaataagacgaacggttaaacgttggacatgaaaaccagggtttgtcttttttttttttgggacggagggagtacgtctgatcaagtgactagcatgctgctatgattaaattgggcgagcctgtcgagtcaaatcttgttcctgcagcttccaccttccccttgcatcttgcatatgtacatcagctcatatgaagtgcatggcagaatagctgggctgccaacatggggtcaccataggcccatggctgtgccatgcaagtaatggacactggtgcgtacctttgcgaataattgcatgccctctgcctctgcctggccatgaatggctatcaaaatcctcaacaagatgtgaccacactctgaacggggacaaaccattaaagtccacaaagttcaaggacttatatcttgaactacatgctcacaactcggaagtactatggatcaaatccatatgtgcagttgtgcacttgacgcttcaagtaatacatcccccttttttattatagatattccaagttggactatcagtatgtttgaaactactatcatcattcaattttgactatcaacttttctataatgttgatttcaatctgtaaaagtcgccatggatataactgaccataaagacgactatggaaaatcaatcctgctttatcaatagacaaggcaaatttcttgtcttttccaaaaaaaaaagactatggaaattaaataacatagacacagaaaatattaataaactctttggtcgcaaagtgtttgtagttagtcttcgactataaatatctttctaaatatttagattagatgcatgaaaaccatacagatagttccataatatgatcttataaatatcacaactaattaaaattaacgttgaaggttgcatttaatcagaaagaccattttatgccaaaaaggcattgcttgttgtatcacagattaatactctcgtatgatgaggacatatctagtgaaaacgagctaagtgttggaaactcgtgaaaatcatacttaaaagtttttaaaatttatgaaaaaaaactagagatatgcaatacattctcaccaaatctcaactccaaactcaacttcgtttaagagaaacaaaaaagacaaatttcaggtgaatagtttgtctttttttaactcctaaatgaagttgagtttcaacttgagatttggtgagaatatatttcatatctacacatatctctagtatttttttataaatttacaaaacttttaggtatgattttaagaagtttttaatacttaactcgttttcaccggatatgtcccctcatatgattcctggacttgaagttttaacctgttactgttagtctgctactgtaggtactgctgaactaggggaggatccttctaaatagtagaagttcacatggcttgtgtctggagtagtctgaaactgcaaagtcgagtagcatgaaaaaaccttctctttgaactgatataatttacttcatgcagctttgttgactgtggcatctctattagccagtccatatgaaaaagcaacgattagttctttgatcttctccgggctattaacaccaacagtatatgcattgcttaatcatccatatcctcattaaactaagcctctagtactgacctaagtaaatcaggcctgataatataatcattatacaatcatattccttgtcggcatcatgatatcttattcctgcttataactagctatagatcaaatcagatttgttctgtagtggcttctattgtcagtcttgtcaattgctcaatccagtaatttataccctgagcattatttttgatcctttgacctgtcagtcatttctctatgtccacatcatttattaagaaatcatcctgtctgtacatggaatctggtgttcagattatcaaacccacgatgccctaggtatgagagtgtgctacagtcagcacaagataagaacaggcaggctaccacagtgctgtactgtactgccattagtgtatcactcctctactcttaccactaagaaattcaaggaggattggttgctaatatgatggtcaatttgtgagcaggttgcaattttgactgtcggtagttggaccatggcacggtttagtgggggccacgcagcggggagccgtatgataggtgggtccaagcggccatgaccggatggcccccatcgatccatgctcagggtggtgggcacttggtacaatccatgcaggtaacccgctccttgggcattatgtgcctccacttctcatttacaactccgtccgaggccggccgggtcggtctcgctgatgtccccgtccgcgcacatggagtgatgttggagattgttcctctaggtttagtaaacacaggtttactagctttatgctgctctccctttcttctcctctggaactcaacaggtatacacttctatgcttcggtgagacaacggcaattgatgctttgcacgcatgtatgtctcctacacttcggtgattcaatgcatgtgtgcgtgtcctattcttttctcttcctgtaaagcttattaattttcagatgtgtcacacgaaaagcatctagttgatgatttgataggattattaccactagttgaatgtcccgaaaggggtgagcatttttggtttcggagggagatgtgtgcctgcaacgtcaatttttggtcgagcaaggcaacaatccccctgtatatatgctcaaaacccagggaccatgcatgcatgtctgtttcctgtccaaatataacaagctcacaggaataatagtcttacagaaagtcagaaataaacggacaccccaccttattatttgtccatgtctggatcctatcgatctgactataggtgtgtgtgcaaggcgcgagcgcgcgctgcagtttcttccacatctgccagatatataccggcataaacaaaaggggcgatgggccgcctgaccgatcgggttattaattaggtgactgttctccctattatgagatcgatctggtcgtcatcgcatcccaccactgctgcgtctgcagtctttgcgcgtgtgcaatcgccttcatgtgcatagtacgcgtaccccctcctcccttctcacgttactgtttccgcgacgccagccgcccggtcgatccatcgattcatcctgtcatgcgcgcggtcacgcgccaattacgcggagagaatgttgtcgcgctcgccgtcccatgcacacgctcgatcggtctcacgcgccggcctggtatctatctggagtcatcgatcgggcatgcagtttgcggagggccttctgatcggtggatcgccgtgcgctgcgcgcgcggcatgtggggacgcgcgacgacgacgcgaggcgcgcggggacgaccacaccaacaggccggcgacagcaagctgctacgtacgccgcggccgcgcgcgcgcgtatcgcgtcgtaccgtacgtgcagaaatcccgggggggagcgaggggggcgcgagatcttcgatcgatccgttccttcctcccctcgcgcgcgcggcagcggccgtgaccgcgagctaagcgaaactgatctgacacacgcgcggtcgctcgcttccgccgcgcctgccatgccggccgcctgccgtgctcagccatgattccacgataattaatctcgtgttcagcgtgagttcgaggcaggaggagcagctaccgactttaattaattggagagaaagtactagtaccagtaccaccaccgatttttgggacgcagctcattccatctaagctatagctacctagctacacgagggctattaactgattccaaacagctcgttctctgtacacgagcgaaggaggtagtagtagtgggagtacactgatcagcagcaccagctaacgggtagtatgggtgcttaattaatctcgcgcgtacagctacagctaacggcttcgattttgtcgtgcctgccgcgtaagtatatttcagcggctggtgggtaatttggtgtttaagccaggcccggcgtacttggcgtttgggagaacatgctgcatatctcacctatatatcgcaggtagatgccatggaggttcgcacggaatcatggagtacataaaaaacaaatactatctccgttctttaatctaatgctgttgactttttatcgatgtttgactattcgtcttttctcaatataaaaatatttaaatcttgcttaaaaatatttgataataaatcaaatcacaataaaaataaataataattatattttttttaaataaaatgaataattaaacatatatcagagagttaatgaccgacctacattaaaaaaacggagggagggagtagtatgtgtgtacgggtattgcataaaggctaaatatagtttattaaaatgtcaaacgcatggagctgtactgctaggtttcatcaaagagggacagatagaagtgaacagctttggtcgatcgtggggggcttcaaaaccacaagagagattattgcgctgtagtgtactgtatgatatatactccatatatagactgaaccaacatttattaggtagctagggagataatcagtttcaaacgtctcggtagatcttgtttttcataaagatgttgacaacatccttcttaaaattcacacactgttagtacaggtagttagcatgaacgctacatgactataataagatcaagctctgcatggattgtatagcacttggtcaccaacaaatgaacaagaaaagcatatatgcatatatagcctgaaaagggaatgataccaccacacacctataacattcccttcccttcccttccttcccacgcacagcatatatccatccatcctaatcaagtgtcattttctcccacagctatctgtccccaaacacatctaattaaaagagtactatgtgtgagagagaagggattgatagagagaaaagaagagagaaggggcaacccccaaaaaaaaaagaaagttggaaaagaaagtaaaaggaggtgcatggtgtggaagaaaagaccaatctatatcttccatcctaggccacctccaagcaacaagttacaccccctctttttcacacaaacacactgcgcatacaaacacacactcctgtcctttccattccatctctctctctctctctctctctctctctctctctctctcagctcgtctcctacctttcatccccctctctcctccatcttccaagcaagaactcctctctcttctcttctcttctttttcctcatcaatctcaattcccaacaagatcaagagcaagtacttgttcagccagctgcgcataaatatatattttttgtgacctctctcaagaagtggagttcttgagtcatcgcaaggacaagaagagatcatcaatggagctgttcccggcacaccctgacctgcagctccagatcagccctcctcctgccaccaagtcaatggacttagggttttggaaacgagctcttgaaacctccacgaccaccaccacggcggcggcggcggcaagtacaggtccttccgtcgctacttcctcctcgccgccggtagcgagtggcggggttggcggcggtgccggcggcttctaccagcaggcggccgtcgcgcctgcagctaacggccacggccatggccatggccatcaccaccaccaccaccaacatcaccagctcggcggcgcactccagttcttgcaccgcacccagcccatcccgccgcaggacgcggccgccggcggcggcctgcaggacctggcgttcgcgcggcccatccggggaatccccgtgtacaacacctcgcggccgctgcccttcctccagagccaccacctccagcaccaccagcattgctacgccgacacgatcggcgtcgcgccgggggccgggccgaggtcccccagcaagcaggcggcggcgctgcggctcgccgcggcgcccgccaagcgtggcgcccgcgcgccgcggatgcggtggacgacgtcgctgcacgcgcggttcgtccatgccgtcgagcttctcggaggccacgagagtacgcaaacctgcttgctgtttttttttcttttttttgcatcttccaaacttcttcatgttagctaaacaagaattgaaccacatatgctacgcagtgttcctgaattttttttcactaattttctccaattttggttttgcaggagctacacccaagtcagttcttgagctaatggacgtgaaggacctgaccttagctcatgtcaagtctcacttgcaggtgagtatatcatctaatccttcaagaccggttaattggttaatctgatatatatccggctgaattaagctttctatccctctctcagaaattaaaccattcgagtacttccttttctaataaagagtcgtaccagcgtagatgtacatctactcctaattaacaatttatatccacaccaaggagtactgtacaaaatacaaatacgtgcctggtatatatatggaagacattcatattatacactattcctttcctttatctgaggacaaaaagttaattacgttcgatcctttctcacacacagtagctcatgcatggaatagtcatttctcagttcacttgccggctgggcagtaaaaacatctctctctctacaagtttcactccccacatgcatgtccttggctagatagatagagagagagagagagaagagagaaaagaggtgtaagcttagcttttgcaacacggggggagcagcttttcaataaaaactccgagatgagcagttggggcacaaagctatagcagcagcacatatgcaaacgcagcgtcagtgcagcgtgttgtttggccattaaaagctagccgcggcccggagacgagacgacatgcatgcacgcaccgcgcggaggatggatggatagatgcgtttctctcgctcgctcgatcgatcgatcgatctcgcacgcacgaagaggggatcgaaagggcattgatatgcatgctgcccaagagcagatcatgggcaagtacaaccacggcatcatttctcaataattaagcttcaacacacacacaccccggcctctgcctgctttgagctgcatgctgcacgctgcacagtcgtagtggtagcagcagtagcagcagctgctgatcgagccatcaatgcctccgtttgtgctgtgtgcatgcaggcgaaaaatttatggtcacttctctctctccttgtactactcctaccactactgctcctttagtttttgttttttgtttttcttttcttttttgaagattgttacggaatagtagtccttaggagtactaatttgacttcatttataccagctctccatccatgaaatgcatgttatgcatttggaaaaaagaaacgtattatattcctcatataaaaaaaatcctatgtattcctgaagaatattggttaccccaacttcatgtaagtacatatatatatatatatcaatgatatagctaattctccttgcagatgtaccggaccatcaagaccactgaccacaaacaacctgctccaccatatggtatgtgtgtatatataacactaatcacacacacaaaaaaaaaaggggaagaagcatcataccgatcgatggtgtatttgatcaatactgaaacgttgcaaaaatatgttggatttgtagggcaaactaagactatcatagagatcccagacgacaatctgtttgacatcaacaacactagtgggtcagagtcttctgttcagcaacaatccaattttgacggcaatgaacaaggatccagcatgtgtgctctacggagcaacaactcctcaaggtgacatacatgcaaacagaaattttaaagccattatttcttataaaactaattgctaaactttagtagttcctatgtttgcttcctaatgctactcctatatcatatgagagcctgctcctattccatttgatctcatcactctggtgacattggtcttaatatcaagctctagtagtagtagctagtgtactgaacctgaagctagtgcttcttgggccctagtattcgatgacaaactaaatgttcctaattaatgtagctattactggagtagttaacagcagctagcactgtagaagtactccaagccaaaggcgaattaacacagaaagcagctatatatagtcagctagctacttatgtctggaggtcaaggctgcttctggttacatgtagctagagactgctatattatgtacatgtagccaaaaagtaccacgcatagatacacagaaattaaatacatgtacagtacattagtactcctttggcgctttcactagctatatatatttgcctttgcatcttttttttctttaaaaaaaacaatgttcagaattcatgtatccatgaaaaaaaattactagcagtttactcacagcgcaatatttccactgtatatatatcttgatttggttggtctttcatgcatgggagtcgtgctggctagcttggcattacctgcatcaaacgtttggttggacttcaaactaaatattcctcaaaatcaactgttacattaagaatacattaagaaccagctaatgcaaggcttcagatattcttttggactgattaaaccagtcgtatgctcctactttaggcgaaacaatatattcctttgtctcattttctttgtgactactgcactaccatatcatcaaccacctccgagtgctcacaaaaagcaccagggctcatacctttgttccatctgctccccatgatggtgcaatcatctcccaaattataatattaagctagctccgagattgattagtatatatgctaattaagctatagcaaaggggacatattccccccccccccccactacaagagacaatagagttctccactagcagaatcttgagaaactacatgagaaacagcatccatatctatagcctctcctgattatattttttgttctctctctttttttacatgatgtgcgatggaatcttttagaccgtggaatataatctcaataagaaatgaaaaaccgtaccaaactaagaatgcactcgggcatgcattcatataggcacactatacatatagctagatcagtacttgtggtgtcttgtggactgtgtgctcagtactgtatgtggtcagtacatgaaccttcctggcagctacatgtgtgagcaatatatatgcacagatatgaaggcattgttcaccgtgccagatcacatgggaggagcacgtagtctaagcatgcatgcacagcttttaccttggattagccaccctcttataaagttagcttgtcatttacagcatcttataacggtgaaattaaagtagggtgttagctttgttccctgccttttgttttctctcatctctagcaatggactcccactgagatgaaaaagagatatacatagatatataggcatttgattctctcagtccatgatacgctttttctctccagggtaatttaattaattcattcatttctctccttgcttaagcagtagaggggcctggttccatgacaaatcaagagatgctacccatggagacatcaaatccttcgaggtacccactttgcaagccaagtttcatcattgtctccaatacctctagctcactaatggccatgatgctacatgctagagttagtgcaatggcgatcattcctttgtttgatcacccctctcgattgattcattctttctttcatgcatctttcgacacagcttccttgctgagctttgatcaatgcatattgtcggcaggctctaactttagcttatatggggggccatcatatcatcagtttctgcacagttatcacatctcatcatcgtcatcgcaatcttttattctttttatccctgcatgcactcatctaaccgagatcgtactacattatattgcaggacgtgcagtcacagagccctgaagacgacgacgcctccgacctgaatcgccgccgttccaaataccggagacgactgtcagcgccatgaaacccaacctcgacttcaccttgggaagaatgtaatttaaccatccatcgatcgtcgacgacatttcgatcgatcgatcgatcgagatcgcatcggagattgggtgaagagggctagctagctagctagtacatacatgatacatcatgtgtcaaaactaagtagggcagaatatgagaatgaagtgaagatcagatgcacaaacacacacacgcatgtgtgccccatttgcactacgaagctgaggatcagagaggagatcgaccaaagctagctagagagaagaaattaaagcaaacaagataactgaggctgaggaataagataacactgcaaccgttgatccaggaacaaagtgcaaaaggggggggggggggggggggggttatcgatctagggacatgggctcgtgcgtgcgtgtgtgtgtatgttctttgtgcgtgcgtgcatggtagatatagagagagatatatataccgctagatcataggctttatcaaaggcagggcaagagcaagaagatgggtgccttgcttgcctgcctgctgcttgcttgcttaaagctagggcacatatgcgcattgctttgttgcttctggtttactactactactactaaaaacatgaagagagctaagctagctagctagctatatatatacactggtggagaaatgctttttagtcacggttcgcaaccccctgtagtcccggttttcaaaccgggactaccaatccgggactaaagatcgctatctttagtcccggtttaaatacctgggactaaaaatagatctttagtcccggttagtaacaccaaccgggactaaagagaggggatcttaccgggactaaagagagggttgcggcagtgagatgatcccctttttctttttttccttttttattttctcccaaatcacgtgggatacatatcccaaatcaaacccccaatccatatatcgaagtaacatctcaaatctacatcacaaatcaaatcaaagttacttatacacacaaataaatacatcacaatatcctaagaaattactcaaatacatcacagatccaaacaatgaatcacaaatttgtaacttctcagtcaaatacatcttagtaaatcatcacaaattaaaaaaaaaaaagaatgccgctgccgccgccggtcgccacgaatgacgggcgcggccccaccggccgccggccgccgggcgcggccccgctgcccgccacgcccgccggcgcgcgcggcgccgccgcccgccgccctccgccgagcgcgaccccaccgggcgccgccccgccgcccgccgaatgggaaggggaggccggccgggaaggggaggaggaaggggagagaagggggaggagaggaggaaggggaggagttggagaagagagttagaaaggatagatctgaggagaggggatgagattcgatctgttaagttgtaactgtggagaagaggataagggatagagattatatactacgtgtttaattttagtcccggttggtactatcaaccgggactaaagatcaagaggtactatcaaccgggactaaaaatcatcttgatatttagtcccggttggtagtaccaaccgtgattaaagtggtgatctttagtctcggttggtgttaccaaccggatcctcggccccctgacatacatctgacaggggatgaaccgggagtaaagatcatctttagtcccgattggtgttaccaactgggactaaagatcaaaatttttataaccgggactattgtggattttgccggaccaatcaaagatggtttcactatcagttatatatatatatatatatatatatatatatatatatatatatatatatatatatatatatatatatagagagagagagagagagagagagaggacgaaatggatatgatgcatggtttgtacgttgtgtatgagatgtatacctagctgggggccaagcgttaagagaaagatttcatcttttgttatgccaaaaaaaaaagtgtaaagagagcgcgtatatgtgttgtgtatatgtgtgtgtggaccatgcatgtatatggagtctgattgctctgctcggtctgtctctttagctagaaatagattcctagcttcactgtagtatttactatgcatgtcatatataggtacgagtgtacgaccctgattggatttgtagttcatgagcgacaaaaaaagtgatgaataaagaaaaggtcgagaatatggttcgatctcttgaaagtaactaattaataagtcattcgtttcggattgactgagctcatttaagaaaattttagtatattgcaaggtttccatttgatttggtatgtatggatatatgtcgcgagataaatcaagccaaatctctatgagaaagggaaagacgaatcgatatcgaatcataaccgatcgtacccctctatctctagctatatactccctccgtttcgaaatgtttgacaccgttgactttttagtacatgtttgaccattcgtcttattcaaaaaatttatgtaattattaattctttttctatcatttgattcattgttaaatatatttttatgtaggcatataattttacatatttcacaaaagtttttgaataaaacgaacggtcaaacatgtactaaaaagtcaacggtgtcaaatattttaaaacggagggagtatatgtccatatatgacagtacaaggtagtgacagcgagcgaatgtcgccctccatcctctagctatcagaatttcaacttgagaatgcaaacatttagccatgtcgaaattgtgcccacttgcgcaaactgacacctgagaattttccaatacacgaattgtaatgctctggattacgacggtgaatcccatactacccccttgaaattatttttgttgaaaatctaggccaaagtacgaacttgatctcgggaaccatataactttataactttggtcttaggcaccgagtaagatatgtcagcgcgttgtgagtatatatgtttattaaaaaaaaagcctgaatgagaccgaaggagttcgatcaccaagatcatcggtactacagtagtatatttttatggtcctcacttggttaattccgatcctcaaccctgtcataccaacctcaactccaaaattaactgttactactacatcaatctgaatatatgatcgaatagtagtaatttagaggtccgttcattcatactccatcgtcccaaaaaagacaaattataagaatgtacttagacacatgtttgtccaggtttatctctaaaaattagttttttatgggacggatggtgtaggcccgacagtgaaatcaatttactacagacgccggccggccgatataccaagaacatgcatgtatatgaatgcattacggctgtaacttgcaacagcagatttgtcaatttggggaacaaccctagctatggatatggccgccgtgcatgtgtacgcatgcatgcaattgtctgcgtcaatcactcactcactcagccccatgcacgcacaaagaagaggttgaaaaaaataggccgtgtttagattctattttttttaaaaaaaaacttctaacttttctgttatatcaaatatttagacacatgtatggagcactaaatgtaaaccaaaaaaaataattacacagtatgtccgactgtaaattgcaagacgaatcttttgatcttaattatgtcatgatttaacaatgtgatgctacagtaaacatttgctaatgatggattagttaggcttaataaatctgtctcgcggtttacaggtggaatctgtaatttattttattattagtctacgtttaatacttcaaatgtgtgtctgtatacttaaaaaaattttgacacacgaactaaacttacaaccatagtaagaagaaggattaagaagaggacgaggacatggaccaggaagaagaaggaattgaagtcaaatcttttcaggaatgaccgtgtgtgcgtcgggttgggtggacggtaagatcgacgacgtccagcatgtgatggacggacgatgtgaggcctgaggtgacctctcttggaaagccttgatccaacagccatgcaagctgctatagctagtactactagcgtttacctctctcctctctaatcgatccatcactagatctgccgatttttgttttggggcgttttctgcccccgggaatgcatgcatgcatgcatgcaatgcagtgcaatgcatatgcatacggaagtggctctgtgcatatcgtttaaatattttttaaaaaattaaattaaaagaatattaagatagatcaatatatgatataaatccttccacaaatatgtaagttgaaattgacttatacaatttgaaacaaaaatacttcctccgtttacgttttataatttaagtcattttagcatttcccacgtttatattgatgctaatgaatctagacatatatatctatctagattcactaacatcaatatgaatatagaaaatgctagaataacttatattataaaacggatgaaagtaacaaatttgaccgcaaattacatgttatattcatcttcaagttaattatttttgttgttgaatttgaatatacatgcttgtggagtggcttaaatataacatatcgatatattttactattttttttaaaaatgatgatattttaagtgatatgcagaaataaggggacaccccttaatgtatgaatagagagtttgacatgcatatgcgtggatatccgagcaaaaagctcatctagcttgtacagctttccaaaaacttctgtgagcctgaacaggctactgatcgacctgacccctcttggattggattggtgctcttggctagctccccctcacaccaatttccagggcttgtttggattttacaggaaaagtggcacagctagcaactcctatcccaaaataaatttcaaacatctctcaagaaaaatttaatatatagagagaaaagaccaaagcgccacacgttaacaacaaagtaatattgatagatgagtatgtaagtgttattaaaagataaacttcttgatttgtgaagcaaagagatacaaagtgatcgaggtaaagagagagatgggagaactgacgtgtggatgtgtggcactaggggtatttctaaaacttcataattttttctcttatttaattgacagtaaatgaatattctaattgatgtggtgtctagtactccatctatttcaggttataagacgttttgactttggttaaagtcaaactgctttaagtttgaccaagtttatagaaaaaaacagtaacattttcaacccaaaataaatttattatgaaaatatattcaattattgatttgatgacactaatttagtattacaaatatcactaatttatctataaacttagttaaacttgaaacagtttgactttgactaaagtcaaaaacgtcttataacctaaaacggagagagtaacaaatagccacattttgagattttcttctccaaaagatttacttttgccataaccagtagctaaaaccaccagtttgcgacgcctacggtaaaatttgcctaaaatttattgctataacatataggtcaaaagctgacatatcacttgagctaatgagaagagagggaagacttaggttgcatttggaggtatcggttgagaacttcatctcccagcacctaaaacggaatgatccattagtgcatgattgatcatgaacaaaataaacatgaaaaattgattgatttaatattttaaaacaaattttcttagaatcttttctccaaaacacatcgtttaacagtttcagaagcataagcgtgcgcaaaaaaaaagaagtagaagttaggaagatgtggtaaagaatacacagttagggtgcgtccatttgaggcatgggagggagaaaagtccctcgtttttctcacgcatgttctcccaaactgtcaaacggtttctttttgaagaagtttatatagaaaagatactataaaaatcatattgatctattttttaattttagaataattaatattcaattaatcatacgttaatgacttatctcgtttatgtatgttcttgatattctcctttttctcctctcaaacacatccttaggtcagatgcaggagttagctcatgtgcaaaaagtccaggattgttaattggacccaaccaaaaaatacaataactcgatcaatgcaataaggtatatatgctaacagtgtccttgtcataaactcaagtgcaaaaatattgtggtccgtgtacagatatttatcgctcttcttcctttaattatgcacctgtatatatgcttattgtattgtggagattgatggatactctttttcagtttttctctcttctaactacgctacctgaagactctgtccattcgaatcaataaggattttttttgcagcgttctcggaaaagggaatcaataaggatttaactggtggcactacactgcatcatgtcatctgcgatgggcgcaaaccctcacctttgatggaggtggccctggtcagaggttagtggtcactcatgactctgagtcacctgagacggttaaagacccgtaagaggtaagagttacctttgacggactgcaattaaaatccatcacaggtaaccttcatctgtgataggtaaatattttaactcgttagtagcgatctttatttgtgatggatcctaattgagagccatcacatacctgaaaaatagggcaaaaaaatatatataatgatgtaagcctagctaacagaccttcattaggcattcacaaatcacagaagtactcaacattcacaatcacaatcatttgggcacaaaacagaatcacaaaaaccatcacaatcacattcatctggccaaagagcaaaatgacattaacattcacaactacacaaaacagaatctcaaaaatcaaattcacaagcataatggatcaactcccatgtcgttggacttcacagaattgctatatatgtcactgccgccgccctcatagtcgctgtagccataaccatactcgctatagacatcaccgtgggcaccgacgttttagtctccatcgtagcctctgacctcaaagaggccagatctggcggccctgagaggtggcggtgatggatctgaaggggaaggggggtaaagatccagcgattggggcccagatccactctccaggcagtcgagggcattcagatctggaggccgacgcccgcgagctccagaatggctcgacccgacaaaggtcagccctcgtggtggagaagccaacctccggcttgcttgggccgacggaggtggaggcggtggcagaggcggcagacagcccacgggcaaaggcggaggcggaggtggcgactagaccatgggcggaggcggttcccgacgcgctagagccaatagaggtggaggcgatcagatccaaccgcagcgaggtcaggggtggtcagatccagtgaacccgaccttaggtaggccagacctggaggcggaggacggacgacgttgggacctcaagaggcggcctccactgccgagctcctactggcgtccacgcggcctcctttcctgatctcccacctcctccaccttcgcatccaacaagcgtcgacaccggtgccgcgcctccacctttggtacccgcagccgctggtgacgcctccacctccgggccacgcacccgcattcgctgcctccacctccggtccccacaccagctgatgaactgagaggaagagagaaagggttgagagggagagagagagggagattgagagagataagttggagaaagagattaaaaacgatttggctatcggtggcctgcagtagtgacggcatggaaaaaaaagacccgttagagatgccttttcgtctttaacgggctatgctgttgcacccgtcacatgtaagggatcacctttgacgggtctctatgtgggtccgtcaaaggtgtggtctgtcgggttcatatataggcccgtcacagataactatttactcatgaaggaccgccgtctcatatcctcatattgaacggactccagttaaacttatcacagatgaggtcatcgatctgtgacgaagcactttggcccgtcactgataggccgttgcagatgggcagatctggtgtattgtggaaaccaacagcaaaacaaattatattattgcataaacagcactagataaaaaaaatgtctgtatcatttccccttcatattggctgccaaaaactggaagagccaaacactaggcaacacatccagctacagtaaatcaataaggacaagcaacaccacacagcgcgcaaaatgagagatatatcgtttgattgaacgtatggggacgaagaccaaaattcttgctttgcgcgattcgcgcgggttccatgcaatattattgcgtatatatagatggcccacctgcatacagacatgcatactatacagtgcatgcatagctaagctagctaggatgcatctatctctgcaactctctctgctgacttctctgatgagctctctcggatcgacatgcatgcatgcatgccgcggctgactgagccacaccacaccacttgcttgctttggtcgattgcatgccttgttttacttgcattcgaatttgcactcactttgaagcagcaacacatgttacattatttttttttcttcactattttcagtttggagcatgctagaacgtacgggtgattttttttcctgctcttgatgagatattggtaggtagtacaaattttcgtattaatttgtgatactttctggtatctcatgaatatataagatatcataagatattaagttttacatgaaaagtattacccccatttgaaaatccaaaaaaaaagtttgtatgttctttaaaatgtaccatgatatccctgtatccgggtagtacattttagaaaatacacaaaaacaattatactactattttagaatggaggtgatagtctatagatcgatgcattagatttttttttcaatatttagcctccacactctccaaaactgctgtgttggttggatgatgcatggatccagtggtgaggtcaaggtagggctcatgcatggatacagcaggagtactacatgcacgcactcctctcttttccccctcaaaataccactcacatatgctccctccaccccataaaaaaatcaacctaatattagatgtgatatatcataatattatgaatttgaaccgacctctcttcagattcttatcacatccagtattaggttgatgttttatggaactagatgagtaaggtcgtgtttagttgttttggcaaaaaaaaaatgacgtatacggatgcatatttgaagcattaaacgtagattaataacaaaacaaattacagattccacatgtaaactgcgagacgaatctattaagcctaattaatccgttattagcaaatgtttactgtagcaccacattgtcaaatcatggcgtaattaggctcaaaagattcgtctcgcaatttacatgcaaactgtacaattgttttttcgtccacatttaatgctccatgtatgtgtccaaatatttgatgtgacgaaaaaactagaagtttcaagggaactaaacacagcctaagtgcaaaatggatgaagctgacatacatgattggacaaattattcaggcagagcggcacatgatcaatagtaacccaacaagcaaaatagtaatcgcatggagcgtgacatatcagtagtagtagcatggatagaacaagcggcaggctagcacacgagtctgagatgaagactgaaacgctcaggccagagctcgagctgagaagaaagaatctctgatcgatgaagactgcactcgtcccaatgcaacaagaagaagaagaagaagaagagaaaaaagaaagaaaaaatgaaaacggggcatgaatctacgcaccgggaatatgagaaatgaatgaatgaatgaatgatgaggcactccattacgctatgattggggggcgcccccatgagaaacaacaagcgaccgagtagctggcacactgccaatgctgctgccagcagcatacagtagcgtcgctagcttgccaaagccacgcgctgtgcagcagcatcagcagcagcagcagcagagacgacgacgcaggcgcacgcagagatgcaacagtggatgtggctgggcgcgcgcgagaagaaagagatcaggtcttatcatgtcacacactaacgcccggtgcagacggagagagagagagtgcagtgcagaggccggcagagagaagctatactacagtgatatatatgttcttttttttaacgaagctaaaaataaagaaattattagtgtatgattaattaagtttcaattattataaattttttaaaataaatatatttgatattttacattaatttatatatatataagttgcatgaaacgtaaaaaacgtgatactacctgagtacagggtggggtgctgttgctgcgtgcctgcgtgtacgtcgtttggtggatctggtggtggccggcctcgattgcagcaaaacgagagcggcagcgttggcgttggcgcccaatgcatggctcgtacggtggccgcgatccatccgtcgtcgttgtcttcgcgtcggtcctgaccgcgacccgacatgctcgcccgctcggcattcatggcccctctctcctataccccacccacactggtgatcagtggtcactgaccccaggtcgatctctctcgtcttcgttttaaactttttcttactacacgtgaagtagtgaattatgctgatcttttgtgagaaaatgctgtaaaaacaaaaagggaataattcttgggcggttgaggcgatctgccgaaagccgtagcacaggacgtgcaataattatatactttcagtctttcaccagtaaaaagcgtcgttgctccacacccctttggtaaaagagcggttgcccatttccggtgcagtacggaaccaaagggggctcacacacagcgcacgaagaagaaagaaaggggcaaacggaaaaaaaaaaagaagaagaaaaagaaaaggagaaatcccaaccagcggatgaacgtgacgcgacctccaaccacaagcctctcgcctaattgcgcctgattgggccactaacgggcccacaggacacagcccaccacgaggtttgttgggccggttttgatgggcctgatgggccttcgggaggaggcggtttttttccgatcacccaacttcgtcgaggagggaaagggtcgagagagaggtcagtagtagcgtagtgagcggcggcggcggcggagatggggaagggcggcgagctgtgggacgattcggcgctggtagacgcgttcgaccacgccgtcgccaccttcaaggtaacgcgcgctcgtctctgacctccatggcttcgatccctgtcccgctccaacctgattgcgacctgtttgcgccagttgcgtgcgtagctagggtttagggttttggtggggagtttcgcgttgcgagttgggggccgcatgaggctgctatatttggtgcgtggcgtgggtgggtgggtgggtgcggctttgattttgattcggtttgggagtgttgttgtggtgactcgaattttgatgcctggtagcagaaatccttggaacgtagtatacatgtttggaatagatagggtttttgtgtattgttcattgctggtatcatgaaccattactaagatgtcaccatggttatgggagaatgctgggatttttgcttccccatttgcacagttagctggaaatttggttcgcatttggttaactaatcctgatggttggcacttgtcaggctatgcatagcaaaaacacccaagcaactacatcggagaatgaggaaccaggagatcctgctgttgctgcccctgctggagaagagaacatttcggctgaggtggccgatgagtaagtattgagtatactggtttcttggcaatatcagtttgaagcaatagattgttcttctgttgcgctagcaatagttgtcgtgtgaagaaaagagtaatgtagttgtgagttgtattggtacttagggagtggctttattcaattacttctgttatagctccactttttatattgaagtttaagacttgaatgagctctatacatgtggtttgaaaggtactcccccatcccataatataagggattatgcctttttttttggcaaaaattaagtaggaaaagggcatgtcatggtagttattatgataacttcacctgtttcctggaggattgtgccgctagcttcctagatatattcctagccagttcctggtaacatttttacccaggttcatccctgattaaatctttaccacgtactatacgttcaacaactgacttaatttaatgatgataacaggaggcacttgtaactttaattttctagttttatttctttaaaacatagagagctgcaaccgtgcaatggcttatccatgcgccccatttccccctgatcttgccgtgcactttaattcacatttttcatttatttgcacaatttaagttcttgcattattgtcttggggcttcattcttccaagaaataaagagttattaagtatcgctttgtttatgcatttttaaggctcatagagaaggatggtagccagacagaaccttgtgaagcatcggagacaccatatcagacccatgaggaaagaaagtccactgagcaggctcctcttcaggaaaaggatctggataaagaggcacatttttcagaacctaagatccatgcctcagatgttgctgatgctgagcaaaaagatacctcaaaccagcagacctgggactacaatgaattggtaaaaaagtactatgaacttgaggagcaaagccggaaagttcttgagcaactccatcaaacaaactactggaattaccaagtccctggtcaatcttcagtgtaccaacaaccgcaagttcctgcctatagtgccacagcaccagatccgcattcctcaaccattcaatccccatgctgttgtgcgaatgtacccctggtatcagtctcctgctgttcaactggccagacgagtggggtttcttcttgtatgcaaccaagtggtggttgtagcatatcattgacttgtaagtgtcctgttggttaagctaccgttcttgttttattcatctgttacagaacttttcaatcatgctccgttaactgcttatggagtacatgatgtaactcactttcaggtgatcaatgccctggcacaagtgcgacagattctactggagcaacctgtgtgcagcaggcagaaaaggtgtctactgacagtgatcaagttgctaaggctgcaatgatgactgctgaaggtgccatgaatttcatgagaagtacgatatctggagacttgggctcctttccaagtaagcattttcttgtttggtgtgatcaaaattcatctactatgtttctgtgcacatcttaaatttttattgcaagagtagtgcaatagcttgttttgtaccttttttcctaatccttgtatcaggttatcatgatttgatgagcttcctttctagttttgaactgtggttaggattagtaggatatgttgtgcttgttttttctacaatccttcatttgtatatttgtatgtaggaacagacgctgcatctggaaaggagagcatgcctatgggcatgaatccaaattttgacaccatgggagcagatagtgatcttgctgttgtcttaaatgcatggtacgcagcggggttttacactggcaggtaattctcgaactttgaccttggattgcaaagttgcttttcccacatctccgtccatatttaccatccaaatctttgttaacacatattctctttttatagttgagaaaaaacatgtggatcgctttgatgtcactctgattgtttggcaactattttcatattttggataacaagagctcatgaagagtcatcttttcttttccttgggcagtacctcctaacaagattgatctgtttagataggtccatgatggcctttttattgattttgacaacatagatataatatatggattaccttcttatgtgcacctattctgtcatttctgtgctaagtcgtgctatcttgctatagaattttgcattcatctgaattctctgattattattgacaggtacctcatgcagcagtccatgaaaaataccagacaaggctgacttctattaaaaagccatttggagtatcgccaaagatgtcctttccactccagaaaaatcaagagatctattgacaactcgtggaactgaacattccattagcatatgtaatgctatcagtgcttttctagcaagagttatggtacaattatacatgaatttgctgtaaggctctgattagacattaaggagaaacgatggtactgatcattttgctatccaaatctatcagatgatctgtagaaacaagcgatccctgtgtgatggttttgctatttgccgcccaaatctgcgttgaaaatgaaatgtacagtttttagactactttctccagggaggcacttgtgcatgtcgatgtcttacatctgcctctcttctgggcagcttccaatctttacaggtgggtcgtggcctcgtgggtgcaggtttaagcggtgtgctaaaacttttgtgcttatgtttttgtctacttatggcgtcttttagcacatagttgctgtgatattatgcttgcagacctgcctctgcctggccacgaattgttatgtggcggtggaggttggccggtcaccgcgctgcacctttcaagtgtgatctgtccatcacttcagcatacacgttgacccagctgctgcatcaagccgaattccattcgattgtccaatagtactcctttgcaataagctcggcttgtgtcattttaacggtcaatcacgctcacaatatgccgttcatgtcattgtcatcatcacagagtgtgccgtctgcctaatgtatccgtacataaaaataacatatccatgcatacttgccgttgttaatttagtactaatgtacacggagaaaactatgttaagacaccagataaaaaaaattataataacgtgttaaaagagggattaggaacgcgaacaacacagagagaggaaagggaagtctttgaaagtctgagaaggaagcaacaactgaccaacacagtaggtggcaccaaagaaaaccgcaactccaaggcaccgtcgacacgaacttcacaagaactccaccgagaggagaggagaggagaggaaacgacgacacctcctccggcgcggcgagacgaatctacgcgtaccgagtaccgacgcggcgaccgcctcgctccgtccctatcctcgccgctccggctgattccgtcgcggaggtatatccaccatctctcgcccctcgcctgcgcgtctcaaccctctctcacatcccgcgctccctcctccgtttccgatctgcagcgcgcgcggccggcgaggagtcctgggagggcgaccgacgcagtcggcctccttccatctcggttcgaatcgaatcgaattgaaggtattcctgattgttagtatcttttgtaaccctcactcccccgcgccgcttgatgaggagttgtggcgtagattggaaatccatccgaagttggattggttttttttttctccaattaaccccatctagtttttcgtcagattttttttttgacgcgtggtgtagtactaataaattatagtagcggtgttttcatagggaaagaaaaaattgggggttcaaccatgccccacgttagttctgcccttggcgcttactgttcaattttgaccttcagagggtagcttttgtactttttacgtcgacttgtgtcgtaatctaagactaacttctcaattgttttttttttttgtgatgattttgttagcctgccagtgaaaatgagtgacaatctgatggacaaggttagcgcctttggcgagcgtctgaagatcactgggtcagaggttagcaagaagatgacggctggcatgtcctccatgagcttcaagatgaaggagatcttccaggggcagactcccgcggacaagattgtggaggaggccacctcagagaatttggacgggcctgattggtcggcaaacctggaaatctgtgacttgatcaacacggagaaagttaacagtgtcgagctgatccgtgggatcaagaagcggatcatgctgaaggatgctagggtccagtacctctccttggttcttcttgagaccattgtgaagaactgtgagaaggccttctcggaggttgctgctgagagggttcttgatgagatggtcaggttgattgatgatcctcagacagtggtaaataacaggaacaaagcccttatgcttattgaggcatggggagagtctggtgatgagcttcggtacttgcctgtctatgaggaaacctacaaggtatatgaatacaatagaccctttctttggctccggcctgttaactaagtcagcaatatagtttattgtattatgctccagtttcactattctaacttgcagcagtgagtttcatttccagtctgtgcctgttcaataaaatattgttcaaaattatatatgctgatccatgatgtgagctagtcattggaccaagcaattaaaatttcgcaacaaatttctcaagaaaggctgctttagcagttagcacaatacattgatctaactattgatatttctctttttgcttcacaactactccctccatctctaaatgtttgacgccgttgacttttttaaacatgtttgaccattcatcttatttaaaatatttaagtaattattaattctttttctatcatttgattcgttgttaaatatacttttatgtatacatatagttttacatatttcacaaaagtttttgaataagacgaatagtcaaacatatttaaaaaagtcatcggcgtcaaacatttagggaaggagggagtaataattatgggttggtgataataatttgtacttgtcaaactttggtgcttgcgagtcagtgataatttgtgatgttcataattgttttaccataagcccttagtttgataatttcgtgcttttaagtaaacactgaacagagcttggtcagcagttccttaaaataatgtgttgaatatttaataataatttaatggtcatttgagtgtccagtttgacagttgtgttaaataactaatacagtagatgtggtgctctcctatttttgtagagcctgaaatcaagaggagtgcggttccctgggcgtgacaatgagagcttggcccccatatttactcctgcgcgttcagtagctgaagctgaagttgatgcaaacttttcccagcagaccttcgaagatgtgcaagtgcatacatatactgctgaagaaacgaaggaagcttttgatgtggctcgtaacagcatagaacttctttcaactgttctttcatcctctcctcagcaggatgctttgcaggtaactggattttatgtaaccttttgccaaaatcaaatactaggattctgtataacttatcattctatttggatggaggaaattttgattacgttgcacacagatattattgtttagatggtctgcatattatggctgcatgaaatctgttttctcatggaagttttgcaattgaaaatacctatgtatttatctatgggaaattatatatatctcattcttaaaacatcaattttgctgcaccctagaaatttactggtcattttatattatttatgcttctgttgttttggctgagactatacggttcaattatatagttcagttctgcaacagatggctttttttaatctaaggtataatgtatggggtctttaacaccttaagaaaactgatttgcttgtttgcttagtatcatttagctgtacatatcaagacaacaaaaagaaaatgttcaaaagatagcctgtattgctttattaagcatgatatgctatttctgataatgatgacatttgttgcacgacgacatgttatcagagcaaacaatacattcagaaagtttgtaccttttatgttgctcaacaacttgtattacatgttgtttaaaagtttcaaatatatatacttgaaaaaaatttaggctgaccgaaagttaatggtggacttgtttaattttattactggttgatactctttctcgcacccaggcataggacaccaaccgataatgcagggaagtgaattacagagtatttgcatccaaaatgtactctttaatgctacctctcattatgtgttgacttgctctgttattatcacaggatgacttgacatccactcttgtgcaacaatgctaccaatctcagcacactatccagagaatgattgagactgctggagacaatgaggccatgctttttgaggccttgagtgtgaatgatgagatccaaaaggtgctgtccaaatatgaacagatgaagaaacccgcagcgtctgagaacgcagaacaacggccggtagtcataccaattgccacagaacatgaagattctgctacggtcggcaatgaagatgccctggtcagaaaaccagctggttctcgagcaaggtcaggtggagatgatgatatccttgatgatctcgatgagatgatatttggcaagaagggaggaagcagttcccaagaagggcccaaaaagcaggatccgaagaaagatgacctaatcagcttttaaataccgttctggccagttcctcgtggaatcagaagatgtttgctgtttcatagtgccgaacgatatctgtattcatccccgtagaagatttcacattcgccaggatttggatcgcttgtttatttgcatacgatctatcatacttgtctgtcacagtttgttcggttgatttaagttgcttcacccttcacatcctctggttgcatgattgcatctgcattggatggctaattatctcttgatggaaaaacacgtccagtataatgaatgagcctcagctcctattcattgctctttgcttttatggttctacctttacaagtttcctattcattgatctgtagttctggctgcaggattcatattatcgtttttctattttactgaagggccgtgagagacagagagagccggtaaccgatttggggtttctcgtccaaagattttacgatttcaaaatattaattttggtgaaagcctgttcacttgtttgtgaaaattctaccaataatgggagagattcatcccaatgccttttcagggtggtaactggtagccgttacctttatcactcaaaagtctcatcggcctttccgctactttggagtagtttttttagaacaaaaaatagaggttgttgacaaatgatgaaccaatactgatatatgtaaatcatgaatccaatacacggtagtcgtattccccaactggcaacaacacgtacaaatgctacattgtacacgtttgttttgatcatatactaaaaagttgccaagtttgccgcagtttctttcgcaaatgtgcgcctggcatcaaattcagcagtatactggctagcaaaaagaataaacttttttttctcagaaaataaatctcgtcacaaatacgaccacaaatcaaccagaacttcactgcattttcagagtaatacatagtagaacgcatgtatagcctagccatcattatccatcattgacatggtcagcacgccgcgagcttggctctgagctctctcctcagtatcttcccagacgccgacttggggatcgcatggatgaagtgcaccttgtgtagcctcttgtagaacaccacctgcagagaaacgcgaaacgacaagctctcgtacgtgaggtctccagcaattttgctgctgttgcgtcgtcaatctcatcccaatcaatacctgcttggatatgaattccttgatggactcctccgtgatgtcggagtcggcggcgcggaccacgaacgcgaccgggacctcgccggcgacgtcatccttttgcctgacattttaacatgcagttattttttttacctcggcgagtaaattctggtggtgtgtgttacgctgttgatggtgaaataatggaggtcttacgggacgacggcggcgtcagcgatggacgggtgagcgatgagcagcgactccagctcggccggcggcacctgcatgaatagacaatagttacagtgcgaattatcagaaaactgatgctaagtgtcctgctgttaattacctggaaccccttgaatttgatgagctccttgacacggtcgacgatgaagacctcgtcgtcgtcgtcgacgtagccgatgtcgccggtgtgcagccacccctcgacgtcgatcgtcgcggcggtcgcctcgggatcgttcaggtaacctgcacgtgttattaattattaccgagacacctcttgtcatcacatgcttgccggcgagctattaacactttactgggggtggtccagtagatacatagtctgtcggttcgttttactgtaggtagatactctctccgtttcatcagattaatgttttgattttagtttaagtttgactaagtttattaaaaaaattagtaatatttttaatctaaaataaatttattataaaatatatttaattattgatttgatgaaactaatttagtattataaatattattatatttatatataaacttggtcaaaatagttaaaacgtctttcgacctcaagcggaggaagtgctaacctttcatgatctgtgggccgcggatgcagatctcgccggggaggttgcggccgagggagaagcccgtgtccgggtcgaccaccttgagctccgcgttccgcaccaccgtcccgcacgacccggacttcgccggcgtcggctccttggcgaacgccgggcacatcgacagcaccggccccgcctccgtcatcccgtatccctgcatcacatcgcatcgcatcagcccgcgtcacgtcttgactcccccgtgagaaggtcgcgagattatggtgatttcttccgccctgatcgcgacgcgcgcgcggcacgcgcggccatgtcatggtactactacgagagttaggtgcagcgaacggctcggatgttgtctccgtactattacgacgttttgccacgtgatggagaaactaatggtaataacttattgtcccttcccaaaatatgctctctgtgttttcgctttgatttttttccagttaaatttaaatttaattaagtttgtagataaatttaacaacatctaaaacatcaaattaatttcattaaatgtaatattgaatatattttgataatatgtttgttttgtgttagaaatttttctataaaaggtttaacaaggaaaaaaaacaaaaacaacttataatacgatgaaacagagtcaatctagatttggatgtaacatattacgtcattcgattttatgttgtactccctccatccatttaagcgcagctataagtttccgtattaaattttgattgtttgtattatttaaatttttttaagaaaaaaataaaaacataagttatacataaagtattttttatgttctatcatctaataacaataaaaaattaatcataaaaaatatcaaataaaacggaggatcaaaattggatacggaaactttgacttagaatggtaagaagggagtaatattttgagaccgatcgataccgacctgtccgaagatggcctgaggcaggcgggcgcggagggcgtcctcgagctccttgccgagcggggcggcgccggagagcacgatgcggatggagctgaggtcgtggcgctccacgaacgggttcttggcgagcgcgagcacgagcggcggcacgacggccgccaccgtcacgcgccaccgctcgatggcccccagcatggcgcccatctcgaacctgggcatcagcgccaccgccgcgccggcgcgcaccgcgcacagcagcacggagttgagcgagaagatgtggaacagcggcagcacgcacagcgccacgtcgccggcacccatgtgcaggttcgggttctcgccgtccacctgctgcgccacgcccgacacgacgctcctgtgcgtcagcaccacgcccttgggcaagcccgtcgtgcccgacgagaacggcagcgccacggggtcgtccggcgagatggccacctccgggacggacccctcgtcggcgtccgcgatcaggtcccagaacggcaggcagccttccggcgtcgcctcgtcgtcgtcgatggtgatcacggtgagcgtgtcgtcgccgacggtgcaggcgtcgatccttgggaacgcctcgtgctgccggagcttgtcgacgtagacggactgggtgaggatgagcttcacgccggaggccttgaactgcttgtggatctcctgcggcgtgcagaacgggttggcggcggtggtgaccgcgccgaggaacgacgcggcgaagaacgccacggcgaactccacgcagttctggagcagcaccatgacgcggtcgccgtggccgacgcccagccggtgcagcgccgcggcggccctgcggcacagcaggcgcgtctcggcgaacgtgtacgtcctccccgtggccgccgcgatgaggcacggcgcgtcggggagctcggccgccctggcgaagcagtactcgtgcaggggcaggtggctggggatgtcgatgtccggaagcttggaccggaacaccgtcaccgcctccggcggcgcctcatcgaccgccgccgccacctgcggctgcgcctccggtgccgccaccgtgatcatggccggaacaaagctaacctagcttcctccggtgcatgcacactctcggattaatgccgacttgctagcgaaccaacagtgcactggtactgcttgctccggcgaggcacgaagagtgggaggaggtggtgggaataaatacagcattagctagcagcaggaggagcgagatgagggagagagagggggttaggtaggggagcaacgcagcagcaggaggaggaagacgagacgagaggcgcacacgcggtcacgtacgtaacactcgctagctcttgcagcccctagctacctaaaaaaaaaaatgtgcccacgtattaatccaagatcgctaccatgccgttattgcacggattgttctgcattagtttctccccctgtttgaggactgaaagaaaatcaagttctccttttggcgttaattcttctcaatttgccaaaaatcaagtagagtataataacatctacttttggcgttaacatcaaattctagtttttttatatataatttacactggcaaaatattacacaattttggcgttaattcttctctttttgggaatattaggtgtcgatgaatgctgatttgttaaaggaatggaattctaatcagggatgtcccctcgtgatcgttctcttgaatattatgcaaatggttataatgaaaatatgagaaaaaaagaaaatgtatattataatgacataaatcactccacccaccacaaatcatgttcaaaatcgatctacacattaaaaaaattcgagcataaatagtatcaatattttatgaaaaattgatttttcttttttaattttggatatatgagttgaatttatagttgagaatttgtaaaatgatatatgtacgtttttgcatgagtgttgtcatttttttttactttctttcatgattatttggattgtatttgagcaaggaaacatgcatcttccgggagattatacaacttgatagtacttgttaaccacaaataattactaaatcatgaaaaatctctttcaaatatcaataacaatagttgcactagttactcgaaatgcatatttaccatcatttatataactcatcagtcttgttttcattgcacaacagtataatactataattgatctaacattgtggatcatacacaacaaaggaattaatcttacacttgcatgaaacacaaggaaaatgtccatatttacatcaatcacagagagatgccatgccactatgccagcccagccgtctcaccagtagtttctgcagctgcatgcgccgcgcttgaagcggtggaaccggttccggtccctgacgacgatctccctcccgaagatctccgagatgagcgcgctgtacgcgtggcactccttgctcatccggaggttggtgacgaccctcaccggcgccccctccggcgtgctgagcaggccgaacgccatggccagcttctggctgtgcgccgcgaccacgcgccgcttctcctcctcgcctgcgtccagcgccagctccgacgtgtcgggcgtgtacccctcgaaccggagctgccactccatctggtgcagcatctcgtagatgtcgtccgcccgcgggtgcgacctgtcctgcgacacgaaccggtgcgtcgcgccgtgcacctcgacggcgctgtacccgggggcctgcgcgaggcccctgtccaccgcctccgtccggcgcgccgcggcggcgtcccggttgtgggccctggcgtgcatgtcggagaggattatgtagtcgccggcgttggtggcgccgaggcgctccagctcctgcagcgcgcgctcggcgagctccaggttgccgtggatgcggcacgcgttgagcaggctccgccacgccgtgtccgtcggccccgtgggcatgctcccgatgagcgcgcgcgcgtcgtccagcctccccgctcgcgccatgaggtccaccatgcagccgtagtgctgcgcgttgggtgtcagcttgtgctccagccgcatccggtcgaagcagcggagcccttcctcgaggaggccggcgcggctgcaggcgttcagcacgccgacgtacacggcggcgtcgggcctgtggccctccctgaccatcgcgtcgaacacctccagcgccttacgcccgtcgccgtgcaatgccaagccggacaccatggcgctgtacgtccacgcgttcttgtcgtccatcgcgtcgaacaccgccgccgcgttctcgatgcagccgcacttggcgtacatgtccaccagggacgtgctcatgaacgtgttcagcctcgcggtgttcctcagcagagcgcaatggatgctccggccgacgtcgtgggcgcccaggtgcgcgcacgccgagagcgcgctgaccatggagctctcgtcgggcctccatcccgcgcgcaccatggcgccgaacgactcgacgcactccgcccagcgtccggccctcgtgtacgccgcgagcagcgcgctccaggaagccgtcgtctgctcatcgtcctccatctgctcgaacgcgcggcgagccaggtcagcctcgccgcacttgccgtagaagctgatgaggctgttctgcgagtgctcgtcacgctgaaacccgagcttcacgaggtgtccctgcaactgcaatcgcaaaaaaaaggagaaaaaaattgaagccccaattcaccggatttcagatcactcgcacggtgctcaggtcagtgtgagctgaaactgtcacctgtctcccttcttgcaaggcgccgagctgggcgcacgccttgaagacgaacgggaacgtgtagctgtcgggctcgacgccgtcatccaccatgtccacgaacagccgcagcgcggccgcggggtcgcggccgccgccgccggcggcggcgacgtagccgcgcatcagggtgttgtagtcgaacgcctcggggtcgtcgagcgccgcgaagatggaggccgcgtaggccatgctcccgggccagtcggcggcgagcgcgcacgccgcgaggagcggccgcgcgtgccgcggcgagcggtcgaggccgagcttgacgtgccgcgcgtgcgccttcctcgcctcgtccaggttcgcgcatggcgcccggtgatccctccccctgaaggccgcctgctccgccgcctgcgcctgcgccggcgacgtcgcggcgatcccgacctggtgctgcgcctgggagagcactaaaccccccaccatgctacatggagcgccggcgttcacaagaatcgtttaccgtgaggagtaaaaatcgcacgtctcgtcgtctcgagcagtcagctagctaggtaagctcgtcgtacgtgctcgttggcggactatgcagacgtggacagtggcgcggagtggggtggtctacgtggaaggattctgtggctgggagggcgcgcggggatttccatgggcggttggatgccatccacatcctggagttggagcgggcaaatggcagcacgccagcatgggccgtgacaaaaatggttgggctcaggataaggtacatacatgtcccacctgggcaggcaccgggtcggcggttggcagttggcactgctctcggtgaagtggaggcggcggatccaaatactacgccactgcttccgccatgggctgaccagtggcagtgaccatcggcggtggttgatggggaaaccgttgatgggatcatgggagtttgtttacccgagaggagttgatttcagacgaatttgctatacatccttcgaattggcccagattatctccttcagtagagctgactgggctaaacgtaaggactgcggctgctcacacacaacacaaggcctccagtccactggtctggcttgagaagcatcagaaatcacaatttaagagaaagtccactttacatccctaaactattggccaatttttagttgcgtcattcaaccgcaaaaccgaatacaaagcatcccctaacttttgtaaaaccagtgaacatcaagtcccctggcagtattgacagtgatttctactgtcatagcttgttgacttaaaatctttgtcccatgcgatgtctacgtgctgtttatgtggccctagaatcaaaaataaaaaaataaaaaaaataaaaaatagaaacaccaatggtgcctccactgccgcctattcccaggtgcccccgtatcttccgtgtcgactccaacaccagcgatcccattgtaatatgctcaagaggctggagagaaggttggagagaagatgggaggagcgagggagagagatggtgacaacacgtttgtctcactgtatttttttttattttccaatgaaaaacacatattgacatatgggtcacattggtgattttctttttgtttctggtgccacgtagacaccacatggatgtcacatggaccaataccaagtcaataaaccacatacgcacttaatttgcactgattttagatattagtaatgctctatgtccatttttacgggtaagagatgtggctggaactcgactgttgataatttacacacaccacttgtaggcatatcactccctcctgtgttttagttttgaagtaagttaaactttcataatttgattaaaattgtaaaattattcactgtctggatcatcaaattagcttaattaaaatccatcataaaatacatgttggtaatgtatttattggcatggtagatgttaattgtttttaataaacttgatttaggacaaacatactgactaggctgccttgacgtaggcccaacaggcaaacgatgcaactaaaatagcttagggtaatacaaagatagaatttgatatagactcttagttcaatgacagagatatacattactgaagactagagctaagataagctcaactaataagattagatttctacaaaatttacatggtgacttaaaaaaaaattaagcatgactttagaggaaggcgtaggcaagccttagcagtcctaggcctgcctccaccctgtcttagttaatacatacggagtaattatcctcatatcctataataattgagacaatgaagtctctcaaccattaatgcacaaaaacaactttgttatctttctttccttttcttcacataatataacaaaattttctctaataaatgctaagggtctattgataggggttcaactcctaaatttaactccagtaattaagtccgtagtgaagtttgtaagttcaagtgccttaatttggtttcggtgattaatgacaaatctaattatatgagactaacgtttttatgagcctttctttgactagtctcatttggatatggaagtaaaaatgatgagaggtatgtattaaacttcacatattctaacttggtctctcttgtggatccaaaatatagtatgagcttcctatttgatctttattgattatgtgcatatgtgttccttcatatccatatgtatgcacatcttgagggggagcttattctatattttgtttattataagatttctatcttgatttgaaatcatttttcatctcatctctctatattgtttatatcgagttattatccatcaccaaagagagaaaagattgtaagatcttggattaaacaatttgtgtaattgttactttggtgatagatgataaaccgatgtttatgggattaacctcttttttgcataagttgtctactaggttatttcccgataatgagatgtggaagacatgcattcttttgtgatggaccttaatcatgacaaggatgaaatgcatggagataaaacgatatgtaccacttcttatctcctactttttgataggttcatatatatgatttccatgttattgatatataagtgtgagactaatgtttactcgaatgttatcttatttagtctcatttacattgagaacatggagatcatgaaggtatatgttttatgttggtctacatcattactacatatgccttctctatatgtataggataaacccccattggtcattctctaattatgcatacacttgcatctcttgtatatttatttgcatgcatatatttagggggagcaaatcctatacatttattgtgcatgttctaaatccatgttgttcacctattatttatatcggatctttgcacttgagcttgcatacgagtatatgacacttgtgatgttaatgaatactcaacaaacatatccatatctttcatatgcaaccggttggtcatcaagtgaaggatgacaaccgatttgttgagactaatgttctcctttgaggtgtgaaaatgaataggtcccactacgatgaggctaatgaatgacaccatgggttagtggtcaccaagccaaggacatcgtcatgttggcaagaatgaagtcaagcttgtgatgagaataaagtcttgacaaaggatggacaagacctcggcataaacatggttcaaccggatggtcacaagtgttgatctcggctcaagcttgaccccaagatggatggcgcaaggcaaaggtataatgtagctaagaatgttttcttagtcttttcccggtcttggtgtttggtgtagaccggatttgctagataggcgtcgtactatcaagaggggtctatgaagcgagcttgtggatgatcttgtgccatattagttcatatgcatgtaggtgcattttgtgggcttgtctaaccaagtgtgatgagttttctcaagtcctaaaccaagagagaagtgggcatgtccaataggagtgagtgacatcttgtgggtatgtccggtggatatcctttggagtgtgagccatttatccttgacttaagttgtgtttcttggatggatttttcatgggttgaatggcactttgaataagctttccatagagtcgaagaacgccaaattccaagacccgagtcaagagatatcgccgttttactaacggtcggttgagctgaaaagtgacctgcggtctgaccgtgggccttaggccggtctgaccgggtctgttagccggtttgactggcgtggtaaggccggtctgaccggccccactggtctattgcactggtctggtttttggtgacgatacagagccgccagagccacaaccggtcagaccgagccgacggcggtctgactgagccatggacggtctgaccggccactacactacggtcagaccgaccaggttgagtgggctcaatgattgccctgtaacggctagaaaaactagccgttacaaagtagtccggtctgaccggcctcacaatggcggtctgaccggcagagcacaaagttggggatttcggttccaacggctaattttggtggttgggggtatatatacccactccccagcagcaaagggaaaggttttggcactccattgcattatcttgaacccttgcaagagctcttacacccttgtgcacttagtttatctagtgaggtgttagagagtgagttaagccaatccaagtgcattgcttcatttttatagctagtgtggcacttgatcatcctcggcaagaatcctagacttgttactcttggaggttgctgcctcctagacggcttgtggaggtgttgcccggtgacctctccgaggagattatggaggaggcccggcaccgtttgtgagtggtttagagttcaccacattcggagtgaaggaagaactaccccgagtgatcgaggcttgggtagtcctctccgtgggccggctcccaccttgcccaccccttgacgaagggggcgtgcggtggcttcgtggttgagcggtggagttgggctcgcctcaacggggattaggaaaccggcgagtttccgaacctcggtgaaaaattccttgtctcttgtctcatttatttgttgcatttacatttgtgctatttacattcatagagacatatttgagcccatatcacttaggtttgtaaaacttaacttagttgcttagttaaccttgcacctcaccttgcctagcaacttaggttagttttgtttaagtgccattaagttttaaaaccgcctattcaccccttctagtcggcctccttgatcctacaaagttgtagagaagcataaacccaaatccacctctctagttcattttgtgagaacacttcagcctacccccactcccttgtttgagtagagctgaaatcatttggttgagctctaactccacataagaggtggagctgaagttggaattagagttgtgccctaatagggcctaagagtcaactataagttgttttacatagtaactatgttttctttccacctacccctctctttcacgtcgccaaatttacttgcattgtatatgtccttatgatatggaatgtagcagtataaatgaagataccacgaggattcattatccaaatagcgacgctccaattcctctgcaagaaattttcttaagaaactttgcaaaatatactaagggcttgtttggggagcttaagattatgagaaactactgattggtagttagtttctgacttttagtttattttatagactatataactataacttattaggacttgtaaaaaaactaaactgtttgagatagcttctgatttcgggagaaattatagctgctaaaagctttctaaacatgccctagaatgaggagctaaatctgagattggttatctaaacagtgatgctctagtttatttgcaaaaagatattttttttgagaaactttgcaacaaataataataaaaaaaccagagcgaaatctctagagaggccacgtcttccgtggcaagaaaaagcgagtaataataacgcaagcaagttcatcttgggccgcaaggcgaactgcatagccgccgtccgtccgtccgataaccggttccccacacaaatacgctcgtttcccccacccaccgcttctcctggtcgatgcgccggccgccttaagccttaaaccctactctcccacaaacccccccacccaaagccgccatggctgccgccgccgcgaaggccgcggccgccgccctctccaccgccggtgtcgtcgccttctcctccgagcgggcgtacgccgatgggggcgcccccgcgttccgattccccggcttctccgcccccccgacccctccccccgccgcgcagccgccgccgccgacgccgccggctcccgcgccggccgcggaggagaagcgcaaggtccggaacgatcacccccgcaccagcgccgccgggttcgaccccgaggcgctggagcgcggggccgctatgctgaagcagatcgagaactcgccgcatggcaaaaaggtagggggattccgggctccaccgctctggttgggtgtttcttggcctgcattcttacggggggttctcgacccgtggccgcgcaggtcttcgagatattgaagcagcaggaggatgtgcggagggcggagaacctgacgaagaaggtggagtttcagaaggagcttgcggcgatcgaactggtgagatatttctcggcctatctttttttttctgtgctcttactttcttagtcatggtgagctgatgatttgaacgaattggaattggttccagtcataaaccattgcaacaagtaaaagagaagaaagcggaacgttttgagacatttaggattatgaaggaacactttgtaggatcagtaatatttttgcgattgaacgtcacagctataatattttgtgttcttatggtaataattttttattcagttctgaccgacattcagtttgacttatatgacttccatatggtgtttattggtgatatttatgtctagctaatctaattagctgccaaagccatttccttgatcatttagccctgtacacattcagggtgtcatcaccagggcaattctgtatgcgaattcacaagttaggacatacttttgttatttaccataaggaattttgcaggagaagacacgcgttgattatgatgagaggaaaaaacttgagcaacagcgagctcaggtaaaatcacagatgtctcgatacgaagatgagctagcaaggaagagaatgcaggcagatcatgaggcccagagagtgagaaaccaggagctcgtgaagatgcaagaggaatcagcgattaggcaagagcagatgagacgtgcgatcgaggagcaaatacaggaagaacgaagaaagactgatagagcaaaggcaattgtggagaaggaaattgagcaagagaaaattttagctgaggcaaatgcgagaataaagttaaaaaaacaaactgaagatgttgaaaggcgattgcttattgagggggcaaaggctgagaaggagaagtgggttcaattaataaatacaacctttgagcatataggaggtatgccagataaatagctacaaaattgtgaatttattggacttcttttctgtagtattataagatattttcataagttttgtataataaatatatttttaagaatttgggaacactcttagaagagatggcttttcattttgtatgcctctactaggaaactagttcctagtttaatatttttttcctttatattttgggatggagggagtactaaagtagactattttaattttatttagtactccatctttcccacgtaaggcgagcatgcattttaagattcaactcttgaaatatttgatcaacaattaatctaatataaattcaattttatttgatgaagataatatcattggactgacatttgaattttactttcccatggttatgattttgttgctacaaacattatagtatataagaaattaaaagttaaaggttggatacacgtgccaagtttgaccgcgtgtccacgccttatactgtgggacagagggtgctgagtggaacggtctttgtgtgctcttgttatgacacaactgttttaatatataaaagtttgagtgtcctgtaatacttttcttctacatgtttcaggtggtctacagacaatattaactgatcaaaataagctagttgtagcagttggaggtgtcacagcacttgcagctgggatatacacaacaaggtaaatttcataagccataccgctgtatatgtctcagattcaagaacacttctttcataagtacccatgaagagagtggcacaaattaattgtccttggcaagcttattgtaccttctttttttcttttgcgcccactttcaactttcaagattaatttccatgaaacttattctaaagattgcacaaagcaaccaattgctctacctatcattcattcactgcccattatttcatctaccttgagattgttgctttcctttggaatgcatctgaatttatgtttttgccattcatttgctcactttatattcttatatagattggtgtattttattccagggagggtgcaagagtggtctggggctatgttgatcgtattctaggtcagccatcacttattagagagtcatcacgagggaaatatccctggtctggtgtcttctcacgtgctatgagtacaatgactagtaaactgaataaaggaagcaacttggggaacaacgggaatgggtttggtgatgttattctaaatccttctcttcagaagagagtgaagcagcttgctaatgccactgccaacacaaaacttcatcaagctccttttagaaacatgcttttctatggtccacctggcacaggaaaaacgatggcagcaagagaactagctcggaaatctgtacgttatacttgacaagtctctgtgaacactaatgacaatgtttcgaatattattagctcactaacattatggacatctacagggattagattatgcactaatgactggtggagatgttgcaccattgggatcgcaagcagtcactaagattcatcagttgtttgactgggcaaagaaatcaaatagaggtttactcctcttcattgatgaagctgatgctttcttgtgcgagtaagtgataatctaatcttcagtctgctcttgtttgaaaatatggatttgcagcatctgaaaatttcagaaaggatttgaatctctatttagatactaaagtagtaaagtttaatgaatgatataaatgatttgcaatcaatcaatcactgaacttgatgtaaggacttgccattccatttgttacatgctttagaatttgccacttgatgcctcagtgacacatggtacttgtgagcgaggtaataagttgactgagtggcaaatcctcagtttccacattcatctatttcagtttcttttgcctgtgtggtgcttgcttttgtcagtacgaaattttcatgccattgttaagctgaaaatggccagtaaagttggggcccaaaattgaccagttgtgcagaagtaactgtatattctgagcaaaaaagtagctctttctcttgcatatgtttatcctaattttcacaagttcacctggaaaacgttgggttagcaaaggaatgtgaatatgtgatcacctttggataagagcactcatcttcgcaattaggtaatgctgtgcagagttctgctttctagctctttaaaattgtaactctaatttcttcccacgttgacattacagggtgtgtattcgtatattttcaattggtttccttaaatgggaatttgttatagtcaaagaatagtattaacatttcagagtaatatcttctatcttgcagacggaacaagacatatatgagtgaagctcaaaggagtgccctgaatgctctccttttccgcacaggcgaccaatctaaggacatcgtccttgcacttgcgaccaacaggcccggtgaccttgactctgctgtcgccgaccgaatcgatgaggtccttgagtttcccttgcctggggaagatgagcggtccaagcttttcaaactatatctggacaagtacataatgaaagctggtgaaaaacacgaaaagagctggctcaggttcttccgcggtcagcctcagaagatagaggtgaagggtgtcacagatgacttgatacgggaggcggctgccaagaccgagggtttctcaggaagagagatcgcgaagctgatggcaagtgttcaggctgccgtgtacggaagcaaggagtgcgtgctgactccagacctgttccgtgaggttgtagactacaaggtcgccgagcaccagcagaggagacgacttgctggctatgagcagaagaatgcttaggaagtctcttttcgcgcaaccccccccccctcccccctcttttgctgtaggctcacaatgtttatttcttgcgaggttgcctgaacggccaggtgatttatctgcttcgttgtctttagctttattattcttttgctgcaatccttacccttacatggggagtttttggcaatggtggatgatcaacagaagaagaggattacatgtatgaacgataacctaacgcagtgtcacttgcgacaagatgggaaatttactggacaatatcattgatcagctctaatttcgcatacatattcccctctgttgatctttattttttaaaaataaataaataaataaacgtcatagactcgaagtcattgatcgccgctgtggtcttctgaatgatccaaaagctttcagtgatatgtggtgttgatattgatctgctggtctacgtcgaaatgatactgatctgttagtctacgtcgaaacaccgtatataccgtgatgtgtgactggatgaagtgttgtgtactcgtttggtcgtcaccattgccccggcatagcgtgcacggcgcccagctccaccgcatttttcttccgcgttcttcattgcggcgagctcgactgctcgagctttcaaccatgagtgttagagtggggccctgcattctgcgaggaatttattcgattctatcctcccacaaacagcatgaattcctctcttaacaccataggctattcagccattgcatcgatttattcaactaataacatgagcacgaattgcaagctcaaaaggatccagctgcaatttctgcccagtatgatgactgtactttggagtagaaaatttgaagagtagcataaacagacagggaaagcaagattaccaccaatgagtagcagttacacaaaaccaaatccagcatatcagtgattctgtgataaatttattgtattcaacaaatgcgacggatgtagtacacattgcctttacccgtatttgtagaaacatttcacaccaacatctgttgttacagttccaaattcagacctaacattgctgtattcatctcgtggcatttgacgaagtggagtaatacatgtaagcagtaatgcacaagcacaacaacatgaggcaaaatagagttgtactagcaacatctaatttactgaagctcattcggcaggacgcaggctctcaggcacgtcacattcatcaagcagagctaggatgttattctcaggggcacttacagagggtaatatggcgcgcttcggtactgcggatcgcgaccttgctccgctgctgtcggactcaagctgcgatccttccttcacgactggcaggtctgtcatcaccctcacacccgctgtagcgatcctttctttccatatcctcccatcctagtatccatcaatcgatgcatcaagtaagggaatatagctaggtaagtagacactggaggaaacagggaacctgtaagagaaggcatgttgttgcaattgtagcactggattttcctctacataagttgaataaaatgcatggttctcttgtgtgtaggtgaaatgaattttctcttgtgtgtcttgctccttatagtggattacataacacaaaccaacaacacaattcttccacaaacagcgactgaatggcttacatgaagtatagatggttcaggaagtggacatttcacaggttgatcaaggttgacaggctccactgggtgctccaccggcttgaactcgacgccgacctcaatgccatgcggactatctgcaggaacagcttgtgaatcaggctctccgctgttcatgttgggtgccaacgtctccacaacctcctgtatcaccaaaatggaaacccccaaatcagtaactatttatcttttcctttgataactaaagtcggtaactatttcggttcccacaattgctggttgattgcaggggtgggccacgtaatattgttagctctgtgcaaatttgtcaggaactgcatctaattcaaagaattgtcaaatcgagagaatttctcataaacaacaaaagctcccaactttctccaattttctggcagcaaccaagctgtctgttcttggttgactaatccaaagaaagcacccaacagttattagtacatactatactatttcacttgaatccaaccaaacaaagatcatctaaaagcaaccatcctcgctgaaacaatcctaattcgagacatcataagagtaaaagaaagcaactaccctgcgctggagaaagcacaatctacccatgataagcgaataagagatcaaatcgaatcagccccaatcgaagggacctcgctgagctaccaataacctagtcttcagctatagccatcgacatctagatccctccttggggaattaaaactacccaaaaaaaacacacacacacaaatgggcctaatataataggaagacccaagtggcgcagacggggagagagagagctcacgacggcgctcttggcgcggcggtgtgcgccggcggagaacctggagaagattccaaccatcgtcccccgctcttgctccgtacctcgccggagctcaagctgggagctcccttttctctcgctatggggggcaggcagctactgatgatcgagaagaagaggaaggagacgaagaaaagaaaagaaaaccgtcgaaagttaatgagaaaaaagacgcaagggtgtccggtcccacccgccagtgaataaaagtgtggaccccacatgtcagtgactcattaaccagaatattagtatttgtgtttttttcttttttaaaaaaacttgaactagacgcgacctgggttgagtgagattagtactactagtactagtcggttggtcggtcagtccaccccgcgacaccaaccgatttcgcagcgccagcccactgattcctcaccgaattttttcattttttttctctctttccattctccccggcgatcgagtagccggcttctgctcgccgcccgcgcgccggagggaggcgaggtccaaagccggcgaggcgccatgcaccacgaccccaaccccttcgacgagggcgccgacgataaccccttctccgtaagcagctactactacctaaccagctctctctctctctctcctttggtgctctctgagatctcgggccggatctctccgcttggttggtgtggtgtggtgtttttgtggcggatgctaatggggtgtgggtgtggtgtagaatggaggaggtggtggagcacgtcgtggtggtggtggcggcggtggtggtggcggtggcggaggcaagtctcagttctcgttcgggttcggcggcctcggcggcggcagcaagggcggtgccactgtcgacatccccctcgacaacatgagcgtaagagaggctaacccaagtgtctcgtgatgtcgtctgcttttaggatcacccactacttctgcagtggtgcttagcgagtggctgatctggaacttctttttaaattatttttgttcttcaatgaaggattcgaagggcaaggggaaggagctgttgcaatgggaggcagatctcaagagacgagaggcggtacgtggatcatgctgttgcctttgatccttggtgttggtttagtattaaatgacgatgctaaattgttagctgtgtttctgttttcttggattttttttttgtgttggtgtaggatatcaggagaagggaggaagctctcaagagtggtaagcttctaagtgcattggatttggtcctgtgattttcttctattctgttattgctgaacctttcaactgaatgttgtgcgttcacgaaaaactgaatgttgcacactgtaccgcgttgatgacttgatgtagccggggtgcccatggaggagaagaactggccaccattcttcccaattatccaccacgacattgccaacgagatacctgccaatgcacagaagttgcagtaccttgcatttgcaagctggcttggtacagcaaatcatcttttgatgataactatccctaatgcagggtgttcctatatactgttttcaagaggaccgcgctattcatacttatggagaatgtttgtgtcattgtaatttacagggattgtactttgtctcttctggaattttattgctgtcattgtctgttggatcagaggaggaggtgagctaagcacttctttctcgctagttttgcattccctgtacaatgcccatgcaggcatgcacctgcacatgtgtattgtacaatttacttgaatagctgtttagatacctaaaacgtgcttttattgcacttttatggtttttactgcagtctgctccaggtcactaaattttgtactttcttgtgcagattccaagctctttttcctggctactatctacggtatgcttggaatgcctctgtcatacttgatgtggtataggcctctgtaccgcgcaatgaggtatgcctccaacagttaatgtttcatactatcaacacagaacaatctactgtcatttgcttctcgcaatttgttaacgaagggattccagtgttccacttcctgtcagcctaactatactgaaaacactaacatgcacatcattgttaataaaccgcagaaaatattcatatgttcataaagatgtaaaataggcaatcatgaattcaatggtgtttaacatcaactgaactgcaagtacctatatgtttactactagcattgcttttatttttaatattctgtcaatatgttgaacagaactgatagcgcattcagctttggatggtttttcctttgctacatggtatggccttgatcaacttgcatgtaaatgcttttttgggttgcaaatcctgaatgaattatttcatgtctttgttttggtgtagcttcacattgccttctgtgtatttgctgccatcgctccaccagttatatttcgtggaaaatcattaacgtaagctactattgagagctttcaatatgatgaacctctgctatttcaacaagatttgtgctttagtttatctgatccgatgctaatataaatatgttttgtttgacaccagtggtatattggctgcaattgacaccttctctgatcatgcaatagtcggggtgagtagttttgtagattctgttttggatcttctgtacctggcatatattgaataagcaactaggcatgttttatgctaacacttctctactcacatagtctacaaatatttcattgcgactttgcaaaggtccgctattgagtatatgtatgtgattttgatataaacttctgttatttcagatcttttactttgtcggatttgccttgttttgcttggagacacttgtgagcatttgggttcttcaggtttgtgactcagtctgctttatcatgatgtcccttccctcctacggagtattagtttgcattttgtttgtcaagcctcttggtgttagcacaaccctttcaggcatgtctggatattatatctgaatggatgatgagtactccctcggtcccctaatataagggattttgacattttgcttgtactgtttgaccactcgtcttattcaaaaaatttgtgcaaatataaaaaacgaaaagttgtgcttaaagtactttgaataataaagtaagtcacaaataaaataaataataatttcaaatttttttgaataagacgaatggtcaaacagtgcaagtaaaacgtcaaaatcccttatattaagggacggagggagtaaatagttatttttgactcatggagtacattcattatggattaaatattttgagtttggacatgcgtatatcgagataaatacagttagttatggaacaatgattatatttattcacataattttgttaatttcttatatatgttagtgcacttctctaattagaagctttttgtacttactattattttcattggtttggctttctatctgttcatttctatgcatgactttcaacaaaagtgaagtttcttgcatttaataaagtaggatttttttttatttacttgtgattgtagctttatggataaaagcacatgatgtagatcagctagccaatcttttgtggctgcgatgtccatttgtctcacagtaaaaaaaaaacaaaaaaacaaaagattgaaggcgcatatcacattctcacattaatatcaatcccttgtaattggtgttatacacctttacctttttaacgttatgtatcatttctcatcatgcattatgccaatgccaacttttgatcctctgattttggtgcatgcagaaagtatacatgtatttcagagggcacaagtgaagtgggccgtggaagaaatattacaaaagcccaccaaatactatctgattgagctgcagttctgtgcatacatatatgtacatgtcgatcttgtatgttatgtagtgatggagatgttctaagtacatgtcaatctatagtgttattttttttaacaggaatactattttatagtgttgttttctgggctgatcggtctgttgtgttgaacctcaattctttacctatacaaattgcactttgttcactcttttgtttgatagttcaattttacggttgattggtctgttggcctacgacaagagccatgctcgttggaaccagaagacagcaacccatctgtctggggatctcatttgtgctttgagacttggaaggaatcttgcactccttggagattcagcttccgccgaacttgggatcaggtgcagtcccaactacaactgctgaacttgggatcaggtgcagtcccaactacaactgcacgttagggactgcacaagatcttgtccattcaatttttcagtggaagatctagattaaatgctacaataaccttgttataataattttgtgctagattgtttgaatgaacagtgtccattaaatttgggctttggatttgcatcccacagccgtagcatgactgtctaagttgcagtcatactggactgcacaggaaccaaattcgtactcttgtgctcaccaatgtttatgtatttttttaacagcaaatacagaaccaaatgaggctgtttatcatatttttcccaggtaataatgttctggtttggcacggtttgtattataagcattgatacaacttgagttgagaatacatgccagaaaatcggcaaacaaataatatacggcacaaacctgacattatatatcatcaatgcataattgattatatcatacggctgaccattaacttgcaagataaaattgcactggaaagtggaaacaaatcgaatttcttcagtttcgtggccgtgggatgttgggcgttggcagccccccagcatatgctttggagatgtcctgcgagtctcggccatctagacatctagtgacatggatgctgacttgtcttggccacacagtgacgcggctgctgatgaagtgatgaggtgctcacctgctgccacgagattacgcgtggactgcgttggtgggctagatgtacatatatggtgcacagcaaacagcaaggttgaagggagcagcatcagcgatatccagcctccagtttccagcctccattccctcatcctcagccagccatccctgcgctgccacgtggcataaccatatctaaattcatgaaaccaccaccaagctttctcccgagcatccctggccatcacaaattcaagcatcgattaatcggcagcacaggaacaagtgcatgtattctccgggacataaaaatgcaggacgtgtaaaataaatctcaaagtacgtccttctcttcgtatcttggcagctagcagacaagcaaaaaagcactgcaactttcagcacataatacttatataaattcagaaattaagtgagaaatgttagaaacatcaccagaaaggatgattgtaagagagccaaaaagcttttcttaacaataaaattcagtgtccatagggagaatgctgacaaaatatgattatttgaaattgaagaactcattttcagttcactataagctgcccttgatatcatcagaaaagaaaggaaaataaggggtaccacatcatcatcatcctctctcctccttatgttctcctagctctatcccctcaattctttcaacctcctctctcttctcatcaagcctcaatcaaaaggcttgaagggaagaagagcaactccagcaggtagaaaggccagaagcaaagatggcgatctccagcctacatgccaccacctccctgcactccccatgcaccaccaacacaagcttcaggcagaatcaggtcatcttcttcaccaccagaagcaacaggaggggtagcacaaggtacggaggagcaagaacctttcaggtttcatgctcagtcgacaagccagtggtgattggccttgcagcagactcaggatgcgggaagagcacctttatgcgccggctcaccagtgtgtttggtggtgctgcagagccacccaagggtggcaacccagactcaaacacactcatcagtgacacgacaacggtgatatgcctcgatgactaccattccttggacaggactggcaggaaggagaaaggtgtgactgccctggaccctagggcaaacgattttgatctcatgtatgagcaggtgaaggcaatcaaagaaggcaaggcaattgagaagccaatctacaaccatgttactggtctcctagacccaccggagcttatccagccccccaagatttttgtcattgagggcttacatcccatgtgagtttacattttatcccatgctccacatgattcttccttctgctgtagtatttggtgtttattcttttgtttcttcatcacatttgattacattctgggtaaatcgctctcataatctcagtccaaattatgttatatatcttaaaaaatatttcaagtacctgatttttcaggaggtaaaaatacttcccgagtaaaactaacatgatcattttgcaagtctaacacaagcagattgtttttccaatttcttgtcattacttattagtttacttatacttttaaaccaggtttgatgaacgtgtgagggacctcctagatttcagcatctacctggacatcagtgacgaggttaaatttgcatggaaaattcaggtctgtccaacagtaaggttaatgtatttcttcttccacatgagccatggaacagcagattttgctaaaataaacttgcacttatgcagagggatatggcagagcgcggtcacagccttgaaagcatcaaggctagtatcgaagccaggaaaccagattttgatgccttcattggtactgctttttactaactaaaatttcaaagctacaattataattcagtaaaaaaaagaagaagctatatttgaatagataaaagatatgcaaggcataccacatcaaatcaccaacaattgaaactcaataaaacaagacatgtcaatgcttaccatttgttatgacagatccccagaagcaatatgctgatgcagtgattgaagttctgccaacccagcttattcctgatgacaatgaaggaaaggtgctacgtgttaaattgatcatgaaagaaggtgtaaagaacttcaacccagtttacctcttcgacgaaggatcaagcatcacctgggtcccttgtggaagaaaactcacatgttcttatcctggcatcaaatttgcctatggcccagacacttactttgggcatgaggtaatttaaatggtttatttgtccctttttgccatgtccgcagcaaaccaaccactgtcacttggatattaaaatgacagcaagatagcgagcagtctgaactccgaagtatgaacaaatactccaaaacaactatagatcaacaattcacttcgtacacaaatcataattgtcaatcagctttcctctcccagagctgtatatgcttactggtttgttgatgtcttcaggtatcagtgctggagatggatggccaatttgacagactagatgagcttatctatgttgagagccatttaagcaacctctcaaccaaattttatggagaggtgacacagcaaatgctaaagcatgcagacttccccggcagcaacaatggaacaggtctcttccaaactatcgtaggactgaagattagagatctctatgagcagattattgctgagagggccggtgcacctactgaagcggcaaaagtttaatgagctccacattcatatttcgtgaatctcttcatcaccataccatatcaatgacaatgggcatcctcgcatttcttgtaactagttttggaaatattacagctagaagaaagtaggatggtcattgcataacttgtgaaaccatgcaatggaacttctaaaaatccctctccatgagggtgctcctacatctcttcttgacacatttcaatgtacatcttctatatttcaatgtagaaagaaatacggttgctttctactataaaaaataggtccttcctttagtgcctctcttgttggctattgcttctggtcataagtcaacaacatatgatcgacaagggaagaaaatacagacggaatatttatagatgaattgggagtaaaatttatgagtggtagtccaatgagtgcctaaccaatctcactctattgtgtggatctgcagtgagaataatgcaattcagtgaatcatattcgttcaccaattaatggagtcatgggatcatcatggttatatgcagctatactttaaacagaagttatatacggtgcacatgatagtttcagataaataacaaacagacaaccatgaaaggaactccagatttcagaacagaaactcataggcttgcatatgtgaatttcaaaagcacattgcataaacatggagtctaagaattgcataaataatatgatgctgagcatgaatatgagacagtgcatgttatgcaagcctaaaagagaagcctacaaactcatacaaaacattggtgatcagcatgtaccggcctaccaggtggtaccaccggaagtcatgacgacaattacaatctgtacttggtgtttccatatgatacaaaaatgtgacttactatgacatgtgttggctgaaagggaattgctagaaaaacactcattatgttggcacaacatgctacggaagtaaaatatccacagtaatagatttacagcaaaacaactgatcatagataaggtttcttcacttgtctcactagttaccatgcatcatcaaaagagaagacgtggataaatccatatctgtgaaggccatggcaagtggttcattgcttgaatggacaatggtccaagcccttgaccaccgagaggcacctcacgcccaggccgccatgcataccagtcacggcacccaggagcagcaatgtaaattcggttcgcctccacgccacagttctccacgtctacacaagcagctgtactcctcccggcgcagtccacaaacaagctgtaagccccaatgttgtccacctcttcccacctcatcttcaccatgtcaagtgcatagacgccaaccttcttcacactcaccaatgtctcaaacatatggcccaatttcggccccatcatgaagagcaccaggagcaatcgatcaccggcggcgaccagatgcgggccgaagtgccaccggtcgaacgtgctgacctcagggaggccggcggcgtgcaacatttgggcggatttgttcggagggttggcatcgaggtggaactccagcagctgcgcgcgatcggtcaagccgaggacgcgcccgcggaattcgaggatggatcgaacgaaggaggcggcacgggggaggctgtgcttggtccaatcgaggcgagggttgtggcccgcgtcgcccacggggagggagaagaaggcgtgcttggaatggaagaggaggaggcggcgggatggcgcgagggcggcgtagtgataggcgaagtgcggggaagggagcggcagcgcgtggcgcgtggcgccggtgagcgcgtcgacgaggtggaggccgtggaaggggtcgcggcggcggaggaggacgaggtggccgcgggaggaggagaggagggtggcgtcgcccgggacggggtaggaggagaggagcgccgcgacgacgagctgggagaaagggacgacgcgataggtggggcagaggaggaggagcggcgggatgcgggggcggacgaggtcggcggcggagtcccggagcaggcggcgccagggctggcacgcggcggcgaaggcgtagacggagcggaggcaggggaggaggccccgtagcacctccgagagcggcagctccggcaggttggcccagtcgcggaactccggcgaaggatccatcaccgcaccgccgccggtgggggaggcgcaaatcatcggagttctcgtggggcgcgccgccggcgaggccttttctccccttcctgcagacgaggaccgtggccggtaaatgggccgggccgttgacgccgccactttaggaataaggtcaccggaggtccctcaacttaacagctagatttttatagatcccttaactacaaaaccagaaatgtgtacccctaaactctcttaaaccgttcaccgaaggtccctcggaagtttttttgcccggttttgctgacatggcatcctagtcagcaaaaaaaaattaaaaaattgcgtggggcccacatgtcagttgcacatcttttttttctctcttttgttcttctcctcttctctcttctctcttcagcgagcgcagcagccataggcggagcggtgtgatggggttctcctccatggaggcgacgagcacggccgcggctgtgacggcaggttcccagacccgaagccagtgcgttcagctggagcagcggctgctacaccaacgctgcattctccgccacgcgctcctcgccgccgcccaaatgctgctgctgcgcctgcgtcgccgctaggctcaccgtcagcttctccttgatcgctcccatcaataaaaatgtggacatcattattgattgctaggagcactatgtgcttgcagacggcgaacgacacgacggcaccggcgaagcctgccggggccgggccacagctgaagctgctggtggacaagcactcgcgtaggcgcgcaaggacgcggtggacttcctcatcagcctcctccgcgttcgtctcgtttgtcgaggccgacgccgacgtctcgctagaggagttcggtgactcgctgtgcccgccgatcccttgcaccggcgaactcttgaccctgccggatagcaacttcgccgtcgtcaccgaccggccactactctacgtgcaggtacgtacgtcgtcataaaacttgaataaactttgcaaattttgcaccatttgtattgtacgtgatttacgtgttcatgatgccatgcatgtaggtgacgaggctgaggtgtggcggcttcgtgttgcatcataggtgacgagactgaggtgtggcggcttcgtgttcagcacccagatttgccacaacctcgtcgacgcggcggggatcacgcagttcttgcaggccgtcggtgagctcgcggaaggcgcggagcgtccggccggtgtgagcgagggagcccctcgacgcgcgccacccgcggcgtccggtgtacgaccaccccgagtacgagctggcgtccgacgaggccagcgacaagctccgtccaggcgacgagctcgtgcaccgcaggttcctcttcggccctgacgacgtcgccgcgttgcgcgaccagctccccacacgcctcggccccggtgctcacgtttccttctcctcgagtccccgggcccagaccgccgctttccgccgcctacagccgccgacaccgcccttccgcctgctccggccgcgcgccgccgcccgctgccgctcgcctgccgctgcagccgcgctctcccactgaccgccgcccctctacctgctccagccgcactcacccgctacttgccgcggcggcgtcggtaaccgctggctccgggtctgggaacctgccatcgccaccgcggctgtgctcatcgcctccacggaggagaaccccgtcacgccgctccacctgtgtctgccgcgcttgctgaagagagaatcagagaagagagtacagaaggagaagaaaagaaaagggaaaaaaagtgcagctgacatgtgggccccacgtaattttttatatttttttctgactaggatgtcacgtcagcaaaaccaggcaaaaatactgccaagggaccttcggtgaatggtttgagagagtttaggagtacacatttctggttttctagttaagggaccttagaaaatctcgctgttgacctccggtgaccttattctgccacttttggatgcccgtatgtgggcctcacaacctcagctcaaaggcccaagagccatttagtttacctccgattgggctgaatctgtaagcctaaccaaacaaaatcaatcgtactaaaacttccgaggttctgtttacggagaaacacagctgactggtaatcagtttctggaaatttagaaaatttgggttttaaatttttagctttagtttattttctgtattctataactacatatttttagactctgaagaaaatatagactgtttgaaaaatgagagattttagcagatacagcagctaaaagtttagctccctgaagcttcatcggccactgcaatcttgagaactgaaagcatcggcgattgcatccgcgtggaggttttgacttgtgctttcccttcccgagtcaacaattttataagatcagtcactagcatcaaggagctgggattaaggggagttaaacacaagcaaaggtgatctacgctgtcctgttcctgattaaaaccacggtgatgatctgtttcatgcttccttcacgtgtactcgcacgcctccccaagctctcgctccatcgatcggccatcacgaggcactggctttcaattgatcatgtcttgatcactcgcgatcagtacaagtacgagttcttgcaaattatacaaggacgtacgcgtcggattccttgggtttcccacagcaaaaacaactagtttcggactttgtagaacacctgcaagggctagtgtgatgaagcatatatatgaagttgtaaaaaagttcagcacgagttatgtactgcagcagtgcagctgatggtgtttcagtacattattggagattcagatatcagcatggtgtactggagtactacaaggaccaaatgagtcgtgtattcccaaatcccaactcatgactgtcagtgtagataatttcatacttcctacctactaacaagataatctagatattattcaatacatgtataatactactagagttcaattaaattatgcctgatgcttagctagctaactagctagatatatctaataggactaaactaaataaactacagttgcgcctaatctagctatagctacctattgcatattaacgctgaagatctgaactagtactataaagtttagaaaatatgggggtgatggatcgaccatattcttacagtcctctaggagtctagtagcaggtaagacttttcatagttagttaactatgcataacaaattaaattgcaactgcatgtctttaaatattagctaacttggattggggctaatcagattcaaagtttggatccagctcctcaagtattatctccgaatgaaggcagatatatttatttgtatttttaactccctcgatcagtgtcatgatcagagggcgcgggagcatcttagtgtgagctcactaattaatcttgttttggtgaagtgattaattaacaaatctatggacgatgatataagcatatttggacggacctgtaactaaccctaagataatcccgtgattagctgctatggcgtcttgttggaaggataagcatgcaggtcaggtggcagtgtgaaaatagtttcagtttgcattcatatccttctgcgccaatagctgccggaaatagcaatggttgtctctgtatttttttgtacgctagcacaaagaaacattactattctactaattaaaaaattaagatgcttgcatgtgaaggcttgatcagcttaaagcaactatcagctacacgtatgctgaaatttcaagatcagattaaggtctcaattaactctgatcacgtgatgcaagcactggagcaaatccagttctctggcctagcttgtacatatatggcattactttgatgactctgacgacattcctgaagtcattagtgtgtcatccaaaaggccaaaacttttgaagtagcaactggtcttggttattgatcccaaatttaacctttgcaacatggtcaaaacgtaaatctcactggttaatatcgtatagttaagtgcactgttctagcttaggccagcagtttcaggcagggaaagggatcgatcgagtgcgtgcacatgcaaaggaacagatcagcagtgtctgtacacataattaagttctctaattaaattgacagttgttttagaataatagcataagaacaacaagtgacactttttcgagattataatatgatatacattcatatgcatgcatggtagcttgatgtcacatgcattgtagtcgatgcttcttattccatcttgccctagctagctagcttgtccttaatctgcatatgcaagcctgaccatggatcagagaatcccactgatgcgatgggagagagatattgcttccgtgcaacaagctcattagctagctatctttaggcaggcagcgagatagtgtatttaatatttattatgtgaggtgctagatttttaaacacatggacgaacgtgggagttggacaagacaaatctcgaatcaattattgtaacgaacttgaaaagaggctccatggccaagtggtaatggttcttccaatttcattaagtgtactagctaattaattaatggctgtaaacaagacggctaagcgttgtcttaatctaggccttgggtttaattcgttgtcatgtggcatccttaatgacgccttttgtcttctctgtctagtcatctagtctcgctagctctctagctgtatcaccgcaagcactccacatagacgacgttcttacacacttaatctcactagctctgtctaattagttttgccatacatgcaaaccctttggtatccaaattaatagaagcatgccaggaaactaaacatagacattcttacacattgtagatgaaattaagttcgtgttgacgtaatataagtaatgattaataaaaaaaacatgtacgtgcaacagaggcagggaaagagctgaagagggtggaaaaggtatatgcatgctactacatgaaggggaaaaaaagcactaccatgtgagtagcttggactgaagtacatatactacatggagtcaagaaatctgagctaatctggttagtacaattatgatataccctctccgttaaaaaaatcaaccttaaaaatgtgatgtctaaatttattttactaaaaaaatatttctaggttgagtttttttagggggggacggagggaatatatacatatgagtaggtagggcggtagggctttgcctgacacttggttagtacaattatgatataccctctccgttaaaaaaatcaacataaaaaatgtgatgtctaaatttattttactaaaaaaatatttctaggttgagttttttttggggggacggagggaatatatacatatgagtaggtagggcggtagggctttgcctgacacttgtaatgcaaagcaatgcaaggaaccaatcaatcgctgcctgtgcaacctacttcggtcaaaaaataaattacaataaatctaaacatgtatatcttaggttgatttattttagaatagagggagtaatagggaataaatccaggggccagttctcagcagggtttgtaacgtacatgctcgtacaaacatcacaatggcactggcacgtcctgtgcttctggcacgaatattaagtaccaggtgcagtaatgtgctactattacatccatatatgtgtatgcatgatttccttttatttgtgtttagtgtgattactttcttcttgttaatgagagtaaataaacttatgtgagctctctaatctgtttaatttagctagctatacatgcatgctgaaatgaccacatcaatatataatagtagtgttacaatagtgagtaaagtgcacgaccggtctctataacttatatactcatgtcatctagatttttaaactgttaagatgcagatttagacaaaaaaaagattaacaggttctagaatttggatgcacatttttaagagtttaaggacataagttagcgcataagtttagagaccaccgatgcactttactctccaataacaccgtgaacaaatcaaactatatatctctactattataaaaattgaagatgtttttcctggtattttggtacgctatccgtgtttgagtcatcgttcgcttttggaaatacagatccatgcttgacttggatcttagctcgtttacttttggaaataaaaaagagtcgtataaaaaatcccttttaaaaaaactccatatactaacttgagatgaaagttggactcttaattgcaactcatgattatctaaagaaatccaaacgaattcccacagtaaattttaatctagttaaactatctaataataataagattaaaatacttgttgcaagttgcaacgcacaggtatttttctagtgtatatatactatggctgagatcgatctggcctgcccccaattcctcacgtctcgcctgctatcttgcctgtaaattaatgcataagtagaaaacatgttcgtttggtccgtctctcttgcaatacaaaagaggaaacaggcagaacttttgcagtactagctacagcaacaagtcaagagacagttgagcagtgagaccaaatggctttgtatttggaaattggaatcttactgggagaagagagatttaattagctcagggagggatggaacggtggcctccgggaaaaatataatacatcggctgtcagcagaaaattaattagaaacagtaacacaggcttcaaaagatacgttcactagctactagttttgtccatttaaattgaatgatgatgagaatcttgcagagaggccttgactccaagtctatactggcatatgtatatatacgatacgtactgcagtttacacgtaccgacgtacgtgcttgggagtcaaacttcacaaatcatatatacattcctccatgaagacttggaggcttgaattcacagcagagggccgtacagactggaatgtagtgaaatttattgatgtttgttcacacgaggtcaaagtcttttttgaattaactctgaacttgcatcaactaattaaaagggttcaactttggtgatactaatctagctagctgcgatttaacaaaatccactcaaaaatataatccacagagattaattatgacactaattaagatgagctctatggtgcatctatctcattttgtcattactagctagatgaggagcatcatatttatggcaacatatcctatgcacacaggccctcacgtgtacacacgtgcacaccaaataaaaaatatcaccaaaaaatctagaaaaaatcatacacatactttcaattgtattacacctagggttaaaatcttaacgtcaaattcattatattttagccgtaacaaaaaaaacaaaaaatctgatagttttaagattgcaattttgtcagaattttatcttttttgttattctctatgtagaatgaatttgaagatgcgactttgcacgtaaatgtaatactattgaaagtacatgtatgaattttcctagaattttttgtgataatttttagtaggtgtacacggtgtgtacatgcgagggcatgtgtgaataggatacgctccccatatttatatatatgaacaaataaaactgaaaaggttgtgaacactaatattacctccgttttaaattttagatttgttctaattcaaatatttttaactttaaccatcaaattacataaattcatataattttaataacatgtaaattatatattatgaaagtatgtatttatcatgataaatctaaaacataaattttatcttgttcaactatacatattttcaaaaactgagagtcaaagttagcaatgtttgactaataagccattgtttagttcccaactttttcttcaaactttcaacttttccatcacatcaaaacttttcgcttctaactttttcttcaaacttttcaattttagtcaaactttcaattttagcgtggaactaaacacaccctaattaataggataaagctaaaacaatataagtatttttgaaacggatcggagggggtattaaggtaggtcattagggatggcaatcgggcgcgacgggcacgggtagtgcctacccatacccatgcccgtgagattatttgtgcccgtgggtatacccattactacatgacgggtaagaatggttgcccatgcccattgcccgcgggcgccttatgcccgcgggcgtgcccgtttacccgccacaacaaaagcagtggaacaaaaagtctacaagctactaagttcgaatcgaacttaaaacatcaaatattctccgcctcggtgtcgtatctctcctctggcggcgatagagtaagaggagagaaataataagggaaataaaagggaaaccgtagaaaacaaagaacgtggcttatgtattctagtggattttgctcctagcctacatgtaagttagatttcgcgggtaaacgggcaaagcgggcatgtgtagtgattacccatacccatgcccattacccatcgggcatagcttttgacccaataagatatccatgggtataaaatggagaacaaacccaaccctaatagggtttttacccgcgggtaaatgggcaaacgggcacaattgccatccctataggtcatcctagatactagcaagcagaaatgttatctctacttaatttctaacttgatcaattctgaactaataaccattcttacactagatgcactctcccacacactagtattaattaactctgcacacacatatataatccggcatcatatatatgttatatatttttttatgcgagaataaaattaactaattttccatttgccacttgggcattaatcctgccagagtaattaagtacgcagctggtaggagtggccgggtactgctcatggcccttctcatgattaatttatgcgcgcgcgcgcatacatacatacatacatacatacatacatacatacatacatacatacatacatacatacatacatacatatatatatatacatatatatatatatagatatatatatatatctatgtatatgtatatgtatatgtatatatgtatatgtatatatatatgtatatatgtatatatatatacatatatacatatatacatatgtatacatatatacatatatatatccggaagagcaccgcacgtcgcgcggtgtccggtgcgcccccggcggcccttgaaaatccggaggaccgagtaccgtccacgcccggtcgtactcataaccgcatcaggtctccaaggtgaacagcctctggccaatggaacaatgtaggcaagggaagtcggcaaaacggatccgtaacttcgggaaaaggattggctctgagggctgggctcgggggtcccggccccgaacccgtcggctgccggcggactgctcgagctgctcgcgcggcgagagcgggccgccgcgtgccggccgggggacggaccaggaacggccccctcgggggccttccccgggcgtcgaacagccgactcagaactggtacggacaaggggaatccgactgtttaattaaaacaaagcattgcgatggtcctcgcggatgctgacgcaatgtgatttctgcccagtgctctgaatgtcaaagtgaagaaattcaaccaagcgcgggtaaacggcgggagtaactatgactctcttaaggtagccaaatgcctcgtcatctaattagtgacgcgcatgaatggattaacgagattcccactgtccctgtctactatccagcgaaaccacagccaagggaacgggcttggcggaatcagcggggaaagaagaccctgttgagcttgactctagtccgactttgtgaaatgacttgagaggtgtaggataagtgggagccctcgggcgcaagtgaaataccactacttttaacgttattttacttattccgtgagtcggaagcggggcctggcccctccttttggctctaaggcccgagtccctcgggccgatccgggcggaagacattgtcaggtggggagtttggctggggcggcacatctgttaaaagataacgcaggtgtcctaagatgagctcaacgagaacagaaatctcgtgtggaacaaaagggtaaaagctcgtttgattctgatttccagtacgaatacgaaccgtgaaagcgtggcctatcgatcctttagaccttcggagtttgaagctagaggtgtcagaaaagttaccacagggataactggcttgtggcagccaagcgttcatagcgacgttgctttttgatccttcgatgtcggctcttcctatcattgtgaagcagaattcaccaagtgttggattgttcacccaccaatagggaacgtgagctgggtttagaccgtcgtgagacaggttagttttaccctactgatgaccgtgccgcgatagtaattcaacctagtacgagaggaaccgttgattcacacaattggtcatcgcgcttggttgaaaagccagtggcgcgaagctaccgtgtgccggattatgactgaacgcctctaagtcagaatccaagctagcaagcggcgcctgcgcccgccgcccgccccgacccacgttaggggcgcaagcccccaagggcccgtgccactggccaagccggcccggccgacgcgccgcggccggccgcctcgaagctcccttcccaacgggcggcgggctgaatcctttgcagacgacttaaatacgcgacggggcattgtaagtggcagagtggccttgctgccatgatccactgagatccagccccgcgtcgcacggattcgtccctccccccacacaccctctcccccgcaccccgcgcaggttctccccccccctcccgagcccgccccaatcccgccgagtccccaatgtcttggtgggaaggcacgaagggaaaacgcgcttgccaagccacgactctaaggcacggcaggcaaccgggtcgtcccgaaagccaccgggcagactccaaggacgggacgacgggcgggctccgggcgcgcgccacggacagcgggcggtcggacggcgcccatgcccaccaagccccccaggcgtgcggctgcacgcaacccgccaaggtcctggacgcgtaccgcgcgatagcacccgcgccaccccgggttcggtccacgtccgctcgcccgagctcccgagcgacaaccgtgcgcgagctgtgaagggctgcacactaggggtgcgtggggctggctacggccctagcctatagtagcctgtagtggttcggtccacgctcggggcaaccgaccgggaaccgggtgcgaggtgtgaagggctgggctgccacccgccgggcgaccgaccgaaataccgattcggtcgacgttcggtccgccgggcgaccgaccaaaaaccgtgtgcgagctgtgaagggctgggctgccacccgccgggcaaccgaccgaaaacccgattcggtcgacgttcggtctgccgggcgaccgaccgaaaaccgtgtgcgagctgtcaagggctggacgctaggggtgcgtggggctggctatggccctagactatagtaggggggaagggatggccgggctgccacccgcacggcacccggttcggtccacgtccgctcacccgagcccccgagcgaaaaccgtgcgcgagctgtgaagggctggcccgtgcagccaccagccggccgaccgaccgaaaacccggttcggtcgacgttcggcctaccgggcgaccgaccgataactgtgtgcgagttgtgaagggctggacgctaggggtgcgtggggctggctatggccctggactatagtaggggtgagcgcatcgacgggctgccacccgcacggcacccatttcggtccacgttcggtcggcggggcgaccgaccgggaaccgtgcgcgacttgtggagggctgcctcgggctgccacccaccggccgaccgaccgaaaacccgattcggtccacgttcggtccgccgggcgaccgaccgaaaaccgtgtgcgagctgtgaagggccggatgctaggggtgcgtggggctggctatggccctagactatagcagggtggatgggatggccgggctgccacccgcacgacaccatgttccctcggccggacgaccggccgaaaacccgattcggtcgacattcggtcggccggtgcaccgaccgaaaaccgtgtgcgggcacgtagcctgtaccgggcacggggggaggtgacgggagggctaacgctgccctggaccccgattcggtcgaccgaggcactagaacggccatgcccgcgagtaaaacgcaagccccgagccggtctgaggggaacgggagagaacgagaaaactgtgtgcaccctgtgaaggggcaggcgcggagggacctgaggggggctaggtacccagtacacctatgggaaaacgactcacggcactagccgaaccccggccgatgctgggtttcgcacgtgagatccttcccaccgcctcctagcctgctggcacggcgccctggcagtctcgccacgggcccgttccgcacggttttgaggcacccgtgccgccgaaaacacgggactcgctcccgacacctctcccacgcgtggtggccctccggtaggccgtcctcccagcagaccagccgtgctccgtgcggcaggatgcttgggcggccttgccgccgtggctgcgtagcgtatgagctgctttggaccggtgtatgctcgcaggacccccgccctcgtgcggccgactgccggctcccgggccccgtcattccacggccgtccacgcgccgtgccgccccaggcttcaagagatgcttgcgcgctgctacccgtcccacgggcagaggtgctcgcacacgtccgccgcgccgcgggcgccccaccgggcgttccgcggcggctcgacggcgcgagcggcgtggcctcgtagcacctggcacccaagcgtgccggcgctgccaaggccacctcgcgcgtgccattggtcccggatgccgcccacgatacaggctcacggcggccccgccccgtgcctacccataagcgagatgctctcggaagacgacagcctgcccgcccactgccgtgtccgccgctcccgacccggggacggcggcgacgcgcgtcggacggggcgggctcgtcgcggaggacgtgctacctggttgatcctgccagtagtcatatgcttgtctcaaagattaagccatgcatgtgcaagtatgaactaattcgaactgtgaaactgcgaatggctcattaaatcagttatagtttgtttgatggtacatgctactcggataaccgtagtaattctagaactaatacgtgcaacaaaccccgacttccgggaggggcgcatttattagataaaaggctgacgcgggctctgcccgctgatccgatgattcatgataactcgacggattgcacggccctcgtgccggtgacgcatcattcaaatttctgccctatcaactttcgatggtaggataggggcctaccatggtggtgacgggtgacggagaattagggttcgattccggagagggagcctgagaaacggctaccacatccaaggaaggcagcaggcgcgcaaattacccaatcctgacacggggaggtagtgacaataaataacaataccgggcgctttagtgtctggtaattggaatgagtacaatctaaatcccttaacgaggatccattggagggcaagtctggtgccagcagccgcggtaattccagctccaatagcgtatatttaagttgttgcagttaaaaagctcgtagttggaccttgggccgggtcggccggtccgcctcacggcgagcaccgacctactcgacccttctgccggcgatgcgctcctggccttaactggccgggtcgtgcctccggcgccgttactttgaagaaattagagtgctcaaagcaagccatcgctctggatacattagcatgggataacatcataggattccggtcctattgtgttggccttcgggatcggagtaatgattaatagggacagtcgggggcattcgtatttcatagtcagaggtgaaattcttggatttatgaaagacgaacaactgcgaaagcatttgccaaggatgttttcattaatcaagaacgaaagttgggggctcgaagacgatcagataccgtcctagtctcaaccataaacgatgccgaccagggatcggcggatgttgcttataggactccgccggcaccttatgagaaatcaaagtctttgggtttcggggggagtatggtcgcaaggctgaaacttaaaggaattgacggaagggcaccaccaggcgtggagcctgcggcttaatttgactcaacacggggaaacttaccaggtccagacatagcaaggattgacagactgagagctctttcttgattctatgggtggtggtgcatggccgttcttagttggtggagcgatttgtctggttaattccgttaacgaacgagacctcagcctgctaactagctatgcggagccatccctccgcagctagcttcttagagggactatggccgtttaggccacggaagtttgaggcaataacaggtctgtgatgcccttagatgttctgggccgcacgcgcgctacactgatgtattcaacgagtatatagccttggccgacaggcccgggtaatcttgggaaatttcatcgtgatggggatagatcattgcaattgttggtcttcaacgaggaatgcctagtaagcgcgagtcatcagctcgcgttgactacgtccctgccctttgtacacaccgcccgtcgctcctaccgattgaatggtccggtgaagtgttcggatcgcggcgacaggggcggttcgccgcccccgacgtcgcgagaagtccattgaaccttatcatttagaggaaggagaagtcgtaacaaggtttccgtaggtgaacctgcggaaggataattgtcgtgaccctgaccaaaacagaccgcgaacgcgtcacccctgcccgccgagcgctcgcgcgcgaggcaaccgaggcccccgggccgcaacagaacccacggcgccgacggcgtcaaggaacacagcgatacgcccgcgccgcccggtcggccctggccgtccggcggcgcggcgcgataccacgagttaaatccacacgactctcggcaacggatatctcggctctcgcatcgatgaagaacgtagcgaaatgcgatacctggtgtgaattgcagaatcccgtgaaccatcgagtctttgaacgcaagttgcgcccgaggccatccggccgagggcacgcctgcctgggcgtcacgccaaaagacgctccacgcgcacccccctatccgggagggcgcggggacgcggtgtctggcctcccgcgcctcgcggcgcggtgggccgaagctcgggctgccggcgaagcgtgccgggcacagcgcatggtggacagctcacgctggctctaggccgcagtgcaccccggcgcgcggccggcgcgatggcccctcaggacccaaacgcaccgagagcgaacgcctcggaccgcgaccccaggtcaggcgggactacccgctgagtttaagcatataaataagcggaggagaagaaacttacgaggattcccctagtaacggcgagcgaaccgggagatgcccagcttgagaatcgggcggccgcgccgtccgaattgtagtctggagaggcgtcctcagcgacggaccgggcccaagtcccctggaaaggggcgcctgggagggtgagagccccgtccggcatatatatgtatatacatacatacgtatatatatacatacgtatatatatacatacgtatatatatatatgtacgtatatatatatatatgtatatatatatgtatatatatatatatatatatatatatatatatatatatatatatatatatatatatatatatgtatgtatgtatgtatgtatatacgtatgtatgtatatatatacgtatgtatgtatatataggtatgtatgtatatacgtatgtatgtatatacgtatgtatgtacgtatataggtatgtatgtatgtatgtatatatatatatatatatgtatgtatgtatgtatactcagtttgtaaggcttaagtctttgcttcttaaagagacgaaggtattgaaataattacgaagtgcaagcttttatagaagcgtatatgatggagcttttctctatttttgggtggaactttacaagaagaaatgaagcttagcttgttgtctgtctttaaaacttatttatgctttacctatgtaacgggagagtcttatgtgctcgtgtttgtgacttttaggctgcgtacaccctcacaaggtgtagacccgggtttaatataatctattattaaaaaaaaatatatatatcttgatccaataattaatttaatcactaggtagatgcatgataacgatcaatcaattaagctgcagtctcaaagaagatctcagaagtaagagacagagaaattataaataatttattgcatcttgatttttttggggttgtaagctgtgtcgcgcgtcgagccgtggtacacgaagccagctgacgtgagggagacgaaggcgcgcacgttaattagcgcgagagcagagtggcaattaagtagctagggttccgagtttaatatcacagagaaagaggtaagagcaagtttaatggtatagtctactactagctccacttcatttatagctaatctaatagctaatttatataatagttacttactatactattaatatatggtctcacatgtcatacttacattgcgtcttgtagcccgtgctgcagctaactacatatctgtagtccgctgctattctctctcatcttttatcttatttaaatatgtttacagctggttaatagtttgctattgtatctgctctaagagcgatcttagttaattattaatccacatgcttaattaagcatgtcctttgcgccaaagtcggcttctaaactggtcttcggatcgatttgttacgcgcaggaacttttggtcatttagaaattaggatgtgcagtggcagggattaatagccggccaagcattaatattagtaggatgtacttcctccgtcctaaattataaggactacattttttatacacagtctttaatggtatattttgaccattaatttacttcatactatgtttttaacaaatataaaattagctttacataaaaataatttaaaagagtaaattgcacccacgatacaacaacttggcaggtgggtgcgatataattcaagaacttgagaattgaacatccgagtgtaacaacttgacaagtgggtgcgttctagtataagtgcttgacaatttagtattttggtgaatcaatttggctaagtatatgctaggtgagttttttcacattgtcaatatgctaatacacagtaatcctacggatattaccttataatattgaatttaaactttaagaattatatttcacatacaatttacatccaattacctttaagatttttttttgtttttttcaccttctcaaatatcaacggaaatataataatttctacatgcggtttaattgactttcagttattggttattaggataaaaatataaatatgtttatacagatccacgctagtatattgtcaaaataagtacttaaaaatttgaacttatataaaaaaatgctccaaataattaagttgtcacataactgcttatttgttgtattaaaattatacctaccttacaagttgttacatttatacgatcgattataaagttcttatactaaattacacctttctgccaagttgttgtactagaatgcttatttttcaagttattgcaccaatttgcactcacctgtcaagttgttgcaccttgggtgcaatttactcaatttaaaatataaatctagtgatataacctataatttaaaatataaatctagtgatataacctatgatataacctatatagcatatggagtatatggttaatataattattagtaaaaaatagcaactttaatttttattaaaaagagagcgttctataatttaaggacggagggtgtaattaatctgcatcgtatccttcaattcttcttttatatatatacactctatatgacatccacaaccgcatgcagtatatatcctcctctcatactacccaatttcgagaatagatcagcagtaatttaggtagcagttcgtgtgataaactgataataatgacagctagtatggaccagttgttacttgttttatggtactgattaactagtactcatggttaaatcatgacgcatagtatatgcgtagtagtattttttttctccgtctgaacgcggtcaatattaatgtataacatatgtattgaagtacgcatactgatgcagtataagaaacaaaatattgattaaagcaagtgtttgtataacacacggaattagctagtaattagtagcaatcgcgcttatgcaaatcaaacagggtcgtacaaataaaaaggacatgtacatctctttttattttttagaacatctcttaatttggagctcatataagacgtgcgacatattatatattattatagtgtgtttaatgtagtgatggcgtcagtgacgaagtcaaaaattactatagactatggctataagatgaaactcaaccgataaagtgttggattttttatatggtgattaacaaaaattaaacataattttggaggcagtcctagttagggctaatgccctagcttatgcctccacccctgtgtggcgtcgtgcagcttataatttctttttcattgtaaatccgtgtttatttaatgtgaaaacgacgacgtcagatagctaagggaatattagctaggtactagtcgtacatcgacacgaaccaactgtgaaattaaaatacatgtatagtaggtaagatgttgacatgcatatgtgcatgatatatactctcttcagttataaatatttaacgtctaaggtaaacacatgtatagtgcctaggatgtgtcgacagaaatgcacacatgcttactcctccggttataaatatttaatgcttaagataaatacatgtatagtaggagttagggcgttaacatgcaggtactccaatggtcataattacttaataatttattaatattttaattaaaattttgaaacattgataattaattttatattagcataagtttataaaacccaataaacatatgctatatattatggtacttttgacagacctatgcataagatctctataaaccctcaataggattttagggatgcttggaattaacctctattctcctctttaagtttgtttgtattttttgtgtaacaaaaacaaaatccgacatttttacgtaatactccattcctttcatattacaagtcgtttgacttttttcctattcatttttttagtttgaccatatttatagaaaaaatagtaaaatctataacactaaattagttttaaattaatatttgaatatattttgataatatgtttgttgtatattgaaaatactactatatttttatataaatctagttaaacttaaaagagttaactaggaaaaagatttcaaatgtcctgtaatataaaacggaacaagtaatttaaatcgtacaagaatcaaaaggtccgagcgggccggcaccgcttcaatattccgtctttgcaccctttggtcatgcatgcagctagatagcagggcagtacctccccactcccccagtagcgtcgccagagatggcatcagaagaccagtcagtccctgactcccctgccccagagattttaccatgcatgcagccccgttaaattcgttcccctttttaccgccatgcatgcgcgcacgcctctgcctttctgccctctgccgctgcacctcagctaagctaaagctaaattcctcacgcggcctgtttggtaagagaagggaagagaaatgggagttttaaggagggagttaatggtggaattggtcatgggagttatatttttagtcctcattccttgtttggtttcacgtcgaattccctccaagtctcatgaattaacaggtctctcccaggtaagatattggtgagaattcgaccttttaattcctcatcccaaaccccctcgaattcactcctagatatcataaactcccattccccatcaccaactcccttcaaccaaacagtccatgtatgttcgctacttcgcttgcgtctcgacaacactttgcatctcgcgaaacaaagtcagcgaccaccacatccacaccccccatcatatatctctctcgccatgatacatcctctcatctcttctctccctcctctccatctttcttttctccttttctttctttcttttcgcacttacaaaacagcactgtcacttctctctctctctctctctcgtctcgcaacaattttgtccgcttccattgggagcgcggctactggctgggtttacccaacactataccaccaccagtatcattgtactactaccctcgcgagcgtcagagagagagagagagagaggaggtggtggtggtggtcagatcatcatgtgtgattacttcttgcaacggatggagggggagcaggccgccggagacctcgccgacatcgtcctccgcgccggcggggctgctgctgctgctgttgcgggcggcggcatcccgtcgacggagtggcagctaccaccggcggaggaggaggaggaagagccgggtctcttcccgctgccgccgtcgtcgtcggatggctccggcatgagcggcgcggatgcgttcggcgacccgttcgctggcctccccgaccccttcggtggcgactacccctcctctggcggagcggcggcggccgccgacttctttgacgccgtcgtggccaaggccgggttcgtcgacgtcggtgtcctcggtggcggcggcggcggtggctgcgatggaggtggcgttgatggtggtggaggagggtcgtcgctgctgggcatgagcaagcctatcttgcctagggccgccatgcagttgccgtcggtgtcgccgagggcgatacggccgtaccccgtgatggccggtgacacggtgaagctcggcgcgccgatggccggcgggccgtgcgcgttcgacggcgccgccgcggcagggctgcacatgtcgtcgtcgccgcgtggcgccgtcggcgggatcaagcgcaggttcgccgcaccgatatatgatcgctcgctagctatagctcgctgtttcgctcagatctacgcaaactaataattcttgacgagcgccatgaaaccgagtcctttgatttcttgctgtgctggaggaacagttaaaaagattcccaatttagggaaagtttgcgcttccttttcttgctgcccagcctgcatgccctacaatttccccatcttgcacctcccaacaaggcagtaaggatcaagataaaggaaagaaattgtgagccagtttttgatctgttcagacaaaaacagcaaaaatcaaggtttcatacattcaggaatcatctagctgatgaaatgaatgttgcgacttcgtcaaagccagcaaaagtggtatatacacagataggaacatatatattatagcatcgcatagaaggctaatttagtagctcttcaaatcaatttgttcttcaaaccctaagtttcagtttccacatcatgttcagagaaggctatatatccgtacatctgttgaaaacgagtaattaagctagaaagtgttgatctgatgattgagtagtcgagtactttactgtgcatgcatatgggttgcttgatgtggtggattttgcatctgttgatgcaggaagaaccaggctaggaaggtggtgtgcatcccagcgcctgcagcagcaggagggaggaccagtggggaggttgttccttccgatctctgggcttggaggaagtatggccagaagcctatcaaaggctctccttacccaaggtatgatgtgactgcatctgaactattctctcacactaatctctgcctttcacttgcataatatacaatggctaccatctctcttcttctgctactctaatccttgtatacatctggatatctgtgtgctgtcataattgtggtgatcatcatctaatctcataacacatgctcaaactccaatagattcctcaccccaaccaggagaggggaagacacatggattcctgtcttttctattgttagtgtactatagttgttgatagaagcacatgatacaatataaactgcaatgggcacaagtggaggaagtaatagaactaatttcagttttcccctttttttctgagcttggtagtacattaattactttgtcctttcaactggactgtggaattttcatatatagttgcgtatatccttgatatgtagatgctggatggtgtaaaaaaaaattggttatctcaagaaactaaggaattttctcctacttacaaaaaatatgtagagtacatacgtctaatcatgatccctctcacatactttcaatctcctaacagaaatgtatactcaattcaactttaatttgatgcataaagagatatgatgagctaccttttttaaaagggactatgatgagctattataataaaccaaaagaaatttagtatataatatggagttgccttgctatccacaatgccagtttagaagttttgtttttttagaattattatgtgataagttttctaccaaaaacaagttctctttctcattaatcaggaagaagttaaagcgcacatattggaatatactgtttccaacttgcaaattaactagttatctccccattgttgagtaagaaatccatgtagtgatatatgtggattgtgtttaagttagacttaattaataaaaacctttttttgcaccaatcttttttattaagaaattatatttaatgtatttatatatgtgcatgttttcatactctttgtattagtctatgtagtttgttctttcgcaaacagatatatgtgatcaaagttaggttcttttttacttccatataaaattataaaagttaatgtcaggtgctacttacctagttttggttattgtatattatatttgtacgagatcaattactttgattgattccctgtggtcaaaacttgatctttattgagtgtgatttaattttgtttgttattttaattttagtattaaagttatagtaacattatttttaaaacgtcaaataagcatcattattgtgacaatattgaatttaatatagtaactatactttatttttgtattggtttcaaaatatgatttccatatatatgagcaacctaaatacttaacatggttttatatggtttgctgaagataatgaataaaaaatcacatgcacaccagatttatattactcctattttttgtttcacacaaagaagcatgcaactgtcctaatttacattaaatgaaaaatcatgatgattacatatgttaacatgttttcactggaaactagtaaatgtgtgatgatcagtcctagaggtgaatgaaacacaatatgcagatgtagtatatgcatatcatgactttatttatttcgattgattgcccgccaagatatatatataaaatttaaggtttattattattatatacttactttgttctaaaatataagcaactctggttatgcacatgaaaatacgttcagttgcataggcagaaatgcttatattttggaaggttatatagaggagtacctgttttaacatgaatagatgcagtttcctcctaaatatatgtagctacacgttggcgtaccacatcctgaaatttgattgtgtgcaaatgttcatttcttcagagggtactacagatgcagcagctcgaaaggatgctcggcgcgcaagcaggtggagcgcagccggaccgaccccaacatgctcgtcatcacctacacgtcggagcacaaccacccgtggccgacgcagcgcaacgcgctcgccggctccacgcggtctcatcacgccaagaacagcagcagcaacagcagcagcagcggcgcctcctcagcctccaagaacaactcctcccacagcggttaccaccaccaccaccaccagaagccactcgtcaaggcggaacccaacgatcaatccgccgccgccacgaccgccgccacggtgccggtgaaagaggaggccgccatggtagggacgtcgtcggaagcattggcgaagacgacgcagaaatccatggaggatgctgctgctgctgcttcagccacggcggcggcggtggagcacagtgatctcatgcagcagatgttcagccagagctaccggccgatgataccggaggcagcggccggcggccaccacgacgacttcttcgccgacctcgccgagttggagtcagatcccatgagcctgatcttctccaaggagtacatggcgaccaattacaagccagcaggtgacccagcaggcaaggagatgaatgcagtagacaagggcttggatccagcgtacatgctggattggtcttctaccactgttgttactagagctggtgggagctcatttatgcaaggggagggaggtttatgacattttaatcactttgaaacaaaaggcaaaagctagtatatgcgaatgcaaacatcatgatatgtgtcttaattagagtctagatagtaaccaacttaaagatgacaagagctagcaacaaaattaagcaaaaatgtgagagagggccttttctcctcttataccctggtatgtgttgagtttgctctcccttttccatttcttctttctacatgtgttagaggtttccattttgttccacacaatttatgcatgcctcctttggaagtaggaattttataggtttttttgtaaaaaaaataaactagatcatgtaaaaatactgtaaaatttctacattccaaaaggatgccactagatgtaagtgtcacttgcttttctttgccaacaatgtcttaggtaggaaggttggtgatgagtccatcaatggcgctttctctctctatatatctatctctatctcccatgcattgtttttttctcttttgcagtgttcattgttatagcagaacactatattctatgctgttggagaccgaaacaaatgctcctactcgatgaaaagagcattataaagacatgtacttcaagatgtgacagaaagctggaggccgcagtgatgaaagcttatgttgcaactgttttaggggaagtgcactagatgtgacctgagtaaacatctctctctcctcagtgggcagaacagtgcagcactggctgttctctgagaatctgaagagaaaagtttgagaacaaatgcttctctcgcatcgcttgcatgagaaggggatatgttggatctgcccgtggtacatagttttgtctcctgtgaggaaaatacatttaatccactgcccctctgctactggccggagcacacatctgatcggcctcatggcccatgcatatgcatgcatcatactcctagctgcctagtactactactcccgatactgtactgctgcacatgctacgcattgagtctacatatgtacgtacatgtatgtacaagttgcacaacaactatatggtcccttctgattcaaatgaaattcatagaaattctaaaggattttatttctataggatttttttctatatagccctttgaatcaaaagaatgaatcctatataatcttatgaaatttctatggaatgtctaatgctatgtaagttttggaggaaatctagcatgaggttctacctcatggaaactttcctatgattcttcatctctcctctaattcctatgttttttctgcggtctaatcaaacgaccattcctatgttttcttgtgttttgcaatcctctgttttgcacttgcattcttattagaatcctatattttttctattcctccgtttttttattcctacgattcaaaggggccctacatgtatatatacatgtgatcactgacagacgtacaggcaaccatgcatacgtaccacatactccctccgtccaaaaaaaaaagacaaacactgggtttccgtgtccaagttttatcatccgtcttatttgaaaaaattatgaaaaaaattaaaaagacaagtcacgcataaagtattaagcatgttttatcatctaacaacaatgaaaatactaattataaaaaaatttcatataagacgaacagtcaaatgttggacacggaaacccagggtttgtctttttttcgggacggagggagtacgtacgtacattcatgcatgctatgctacgtgtgtacagtacatgtctattagtactactactggtagtagtaggctgttaactccgttgatcgatctggccggtcacacatcgtcacatgcactagtagtagctagtatcgcttatgtgtacctacgtttgacgtgtcgtccaactatacatgttttggcttcagtccaaacttcaacctgtacgaattaggaggagtggagtactcccatgatcaatgcaatgcatggcttttaggcatagaacttgttctgccaggccgacacgagttaataccttttcccatccggccatagtgcgtgcgcgagtacgtggggccacccgttttgaatacataccccgccaaaggagctaaccttgaccgtaaacgtacagcagtagaaccgtgtgtggggagatgtgatattgcaaatttgcagttatatgtagcagcctaagcatgcgataaacggcagcatacacaggtagggatggaaaaaaaagaccaagctcgatcgaagtaaccgggaccgagaaattcggtcctagtgtttaaccgaccgagcttttattcattcagtaggctcggttaatcgaaatatccgagaaatacccaaattctacgtgagacccaataacagccactagcccaaagaagagtacacacgagccatcctgtcacatcgtcccctgtgtagcctcatcatcctaccgcgcgttgttgtttgttggtgcctagtgacgacacctactctattggagatctagtgcccagtggtggtcatgctggcaatgagcggaggagggcgactagagagacatttgtcgatttttcacgtcggccgatgctggccaaggtaccaacctttggcctcgacggctcttcaggagctgaaaattgtggaagttatgatggtttctgttatttttttcactgtataatttcgattatgatcgagaccgagcttgctcagtcttcaaatttgtttaggactgattggtcttgagttgttgatgcctgaaatttcaatcaagactgaaggccgatacacactgcacacaacaggtgtgtccctttaacacatgctaaaaaggagtccatgataaacaaccaagagcttactattactcatttcttttttatttggactaggagagccaagctcccccccccccctccccacacaaaaaaaaaaaccttttccattaatagaaattagcatttccaatttttttactacatttctatttgaaagcgtgtaagggtgtgtttaattgtgcaaacctgattgtaaaaaagtggatggagtcatggttggatctactttcccatacaactccatcaccacactaaagatgctttcctagcttgcaccatgcaagtatatatacattggctttgctaaaattcatgccatcaagcaggctttgttcttttcagcttacatgggcttatggattatgcacaccacggtttctcaaaccacgatttcttcacaaaactttatacatcagtatttgcttaattagataatatatctgatcatccataaagaatagggtactggcggaatgagaatttttttttgctagtaataatatctgtgagagtgaaaactaaaaagaattcgtgaacgaagggaggtatatataatgtataaatatttggtggactttgattattataaatcaagccaaatttaaaggagcgtcttaaataagtaaaattaggcacgcataatgttgctcctttttttttcaaaacgctcatcaaatactccctccattccaaattgatctacatatagtttttttgaggttattcctaaatgatctacatatttgtgttcattcattaagtctattcgttatttgtgcattggagtaaatggacattgatgcatgcatccatgcacacaagtatttataacccatatgcagtatcttgattttctattggctaggaaataatggggatggtgcatgcattgagtttgttgctagagtaaatatagtatgtgggagttattatattttcttagccttggtgtatctatgaaatatgtagatcaatttagaatggagggagtataaaggagaaaagaaaaaaaaacgaccgtgcacacgcgggtgcatatatgatcttgtctccccagttactatcaggcccggccggccgaccaggcagggccagaaaatcgtggccgttccctccctcatcacagtagctctgatacgtccctttcgctttacacgcccagcagtctagtcaaagaaaagccagtggacactaaagaccactcatgctttttgcaatttttttccctagctttggctggcctggtgcttgcattgcagctagctagcaatccccctcaaatttacttgggacatggacgctatgtgtggtggagtgtcataatcgagctaaagatgaacagcgtcttcaattaatcaaagtttaggaacatcatgctgtttgttttttttaaaaaaaataatatatactatatagtacagtttaccagaaatacaggattgttcatatgagtcgtatcgttgtgaccctatatcttcatttagattttaacatcgtaggccatgtttaaaaaaaaactcatctaatttgcacattgtagactttgagacatcaaatttaatatttcctccatcccaaaatataaaacttctatcatttagattttttttcccaaaatttaataacttcttcaccaacattttttttccaaccaatcacaatcattcaacatttattttccacctacctctacttcttaaccaattacaaccttctccatttaattttatttactttattaataatcgtgtttaactctaaaacttattatattctgaaacgaaggtagtacaacttatttttttatcgattttaaattttggacttaattatcaaaacatgagaaggctacaagcctacaactaagactctaagtcaagtaaattaaacttgatatttcttgattagtcctactccctccgtccaaatcaagtaactggacagtatttgtttttgctcattcatatatagcaaagaattgtttttttttcaccggagggagtacgttttataaaggagacctgagctattcctttttcttcttttgtagttcaatatactacaccatccattctataataatccaaatataccaacactttcacctgcattatgatcttctcaactaaaaatcacaatctttcatcagtcggtttctccatgtaatttattttctcaaccaatcataacatattctcctatttaattccatccttattttttttagaaacgcagatgttcataatacacgtacactcgtcgctatgaaaacacacgctcatcctacctctactagcaccttcgaaagactggatcgatatatcttgagattgataaagtcaccacgagcgtctcgttgtcgacagatatcctgatacttttttataatttgtaacagaagtacgtactcataatcctccagaagagaggaaaacggagccggaagtttgcatggaattaattaacgggattgatacgacgtataccagtgtcgtccatgttggatcaccaaaccctcgaatcacgcgcaggagttgacagaggtggatggcggtacgttcaggagctccaccgtgggccgtgtgatgagccgcccggtggacgcttgcaagttgcaatccggcggatgctgcaggcagtccggtatagtgcactggtgagaggcagtgatgactgacaaagcctggatttgtgcaacgattcaagacaactgaacagaactgcgagtgtggcaaatccaaccatggaacaggcgcgcgcgattggctccggcctccggggcctcgactggccacaaacgtacggacacgcaaagaaaaacgtactgtatgcaaataaaatactactagtactgctccaccttttccattctaaattactagttctgctccactttttccattcaataatatagcaacataatataatagccaataagatgtagtacattctaatactacgaattcaaatgacaatattttttttctagatttgtagttcatctagatttatagaattagaatttgttccatctgatactaagttgctatgttttgagatagagatattaactattatatccgtcctaaaatacaatacttcctccatcccataataaaataacctagaatcgaatatgatgtatcatagtaccacgaaaatctggacggacacgtcacatccagtccaaagctattatattctgaaacaaagtgagtgacttttagctacgaagatttatagccaaaaaatattactctctccatactaataaaggaagtcgtttagaacagcgacacggtctccaaaacacaactttgacttattatttctataaaaatatttattaaaaagtgatatatgtatacttttatgaaagtatttttcaagacaaatctattcatataatttttacattttcaaactcaacaacttgagagatattcatgatttatattcccaatgtttgacttaaacattgtcctaaacgactcctttttactagtacggagggagtatattttaaaacagatgtagtactccctccatccacaaaagttacgcctattttacatttaagtttttctaaataagttgttcctatttgtagtatttatgcattcaagaattaaatgaagagataaattaaatgttttattagaacccaaggagtcatctaaatactcattggttgcatgcttgcatttactccttgattttgtaacatccaaagtgatttaatttctctttgattttggtgtccaaagtaatatgtgtaacttttgtggatggagtgagtaatttattactccatccgtcctattttaagtcctattttaagtgtatttgtggattttcgtaccaaacgttttatcatctgtcttatttgattttttttattagtatttttgttgttattagatgataaaatataaataatactttatgcgtgactttttttaactttttatattttttaaataaaatataacgttggatatagaaacccacaactaaaatgctatagagggagtagtattggacagtgtcagagagtcccacgtacttggagtagtcattgtttgatgtgtggccttctgtttctttcattgaattggcaacatttggttccttttatctaaccaagtgatgtgattgttcgatctagtagtacgcacaaccaagtgccaagggcgcatcgatgcaatattgcaattactgcacatgtgacatgtctcacatattaattactcttccgtcaataaattaatataatataagtattttatatatttaaattttgtaatttacaaatataaagttcctactgaagttttaaggtaaagagagatacgatgaaaagttgaattgggtatatactcaatttcaacaatggtgcccgggcaccatgaagcaccaaacaaatttactattactatataggacactcatatggggcaccatggtgcccgggcaccatggtatctaatgcataaaatcacttaaaattttcaaaattttcaaattgtgagtatatacctagttataataattcgattcatacctatacctatcaacaaaacaactcaaatttaactttatttcacaattcatgattacatacctaactaattatatgtatggatgctatatacctagaatcaaaatctaacaaaaacaagttcaaattcagttcaaacttgctttgaactagttagtaaagtggttaatgttaatacctaagtaattgaaaaagattcatactcatttgaattaggtatatactcaatttcagcaatggtgcccgggcacaccaaacaaatttaatatatatatatatatatatatatatatatatatatatatatatatatatatatatatatatatatatatatccattcccgcgaacacattaccacttgtatttctgccatcgtcgcttcccatgatgatctggacaggtgattctttagagcatcccagcagctcctctattcggtcctctatcccctttttgacgcatggaggtgaaaaacaatgctccagcagaccttccatcacacacgccatttttggaggacctccaaaccgagccattcccaagccaaatatggaggttctctctcctcacaccatactcaactgccgacctcgcgactgcataccgtgggagagaggaggtgcataccggatttggaggtggagatcgccggagtagaggcagagaggcaacgatctggcagtgaggtcgccgccatccccaccgcttgaggtctccgcccgcgccgccgctcctctgaccccgccgcccctctgtcccgccgctcctccgccgtccctccgccgctcgcgccgccccttcgcagagactgggtggtggtggcggcgggccatcagcgggaggaggagggagatggactcgccgggaggaggagggagatggacccaccggccgcctcccgccgtccgtcccttgcgccgcccgcaccgctcctctgaccgcgctgcccctccgcccagccgttcctccgactgcgctgcccctccagtcggccctcgtcatccccgtcctctcggtgctggcggtaaagaaaagagaaaggcggggagatcggcggtatagaagagagaaaggtggggagtgaagagataaaggtggggagtttttttagagtggtgataaatatgtggtagttgtaaaatatatgatgttggtatatggaggatgtaatatggatgatctgttggagtgaaaagtaatatggagtaggaatttttttggatgactatctaaatgggagtatggaggatgaaatttagatgagctgctggggatgctcttatagtactcttgctgcaaacccagcattatcaatctctaggattactggcatatatatgcatcactagatcgttgcttcaatattccctctagacacacaagagcttactattatgtccccaaaaagtaaactctagctatgcatgtgtccagattcatagctagaattgaacttttttttaatggacggggtatgtctaaactataattcttctctaaatattccattgacattgatttttgcatatgcccctcaattagtgctagccatttctttttactccagcaacacccactcaagcttttcccaccttgcccccaatcacttttgtattcttaaccacccatcatttaaggggttgtagttaactataactcgctagtcaattgctactcacccttagatattaagcgatggtttctaatatcttctccaactgaacaaactacctttttttatatttactctctctccaagctataggtgtactcttgagctcttcccctacacaccatcttccccacatcccctctcgtatcctacccctcacgtcgtcagatctattgcctcatctccctctcatgccttaacacaactctattttttgtttcccctattgccgccattaccgctcaccacgctcttccgtccccacgacttttgtgacaccgttgcctcccatgcctcattctctctgtaaaccctgaaaccctaacctgatggactacagtaaccataccgttgctatcgctgccggagaggaagatgagcgtagttgggacgctagctgcttgtcgcattttgtcggtgagtttaccaacgtgctccagggattgaagaagaaaggtgaataattgaatcttgatccaactattcagataggtgattgatttttttttggaaaaaaatcaggtggttggtaaatatctaataagtcgttcaattaatgagggacattatgcgaagtgagtgtagcttaactggttaggttccttgtggtggaaccttcccaggcttgacacggatgctcgcatttacggttaattatttttttagtggtagatgacgtacctatcattaatatcaagatataccgttttagtcttttagaagtattcataagggtaaggtgtgtgcgcgttcatagggataaatgtatgtattgtgagcactatgtttgtatcatgtttctaaaaaaaataatgagcaacattatagtattttctttcttcattcttaatcttgtagaaacgggagaatgctgatatcagggaaatgagggagtagtatcacattgttttcttttctaggaaaggatggcaaggacactgtatatattcgattgcgacgttgcaagagatagttagcagagagcggtacgtttacaagcagacaagcagcacgtgttcgcttttaggaagtactcccctacgttgtctcttggtgacgagcgcgattgcgtccagctgtcctgcctgcatgtttgcacgtagtcccgtcactgaaacggcgcgctgtcccctccccccctcgtctcgtccgaatcagcgggatccgcgcccctccaaccctttgccacacagttttctgctacagcccacacccgccggccggcgacgcgaagcaccgcgcgcacgcgcgcgcggcccgcgacagcccggccggcatagctcaccaacatcacacgcggttggcatggcatctcatctcgtcgcgcgtcccgtcccgtcgcatcgcatcgcgccgcgcccggccggccggccggtatacgtacgaagcggaagccgtacgttgtagctagcctccggcggctttggcgcctcttccccggccccgcgattcgtcgcggccggcctctgcccgggccgacgcgacgtgcgatcgatcggctcgccatcaaccgcccgattggcccaaatatcaggctttgattgatgaatcgcgtggggggcaatggctatacgtgtcgtccgccacgccgtgcgtccaccacccagatgcaatcatgcacgcaagtacgtacgtactatatatcgaccactacacgttgcggcgatcgaggatccagatcagggggggagagcaacagtgcggactagcagtagcatgcatgcacacaaacacggctacactgtattgctgctgctgtcgttgggacggcccatcagtttcacttcagccagccagttggtgacagaattgaatggtcccgatcgatcgatcgatcgattgaatcgatccatacagacatacttcctccgtccttaaaaaaaaaaaaagcaggctatgggttttcgtgtccaactttgactatctgtgttatatgaaatttttttataatttatatttttcattgttgttagatgataaaatatgattaatattttatgtgtgacttgtctttttaatttttcttatatttttttcaaataagacggacggttaaatattgggcacggaaaccagatttgtcttttttttttttttacggagggagtacagagtatatagggtagagcgtcgccctcgatctaatcattgtgtaccgcgaaattggcaagcgatgatcttctgtagaggggagagggtgaacagcgtcgcgaggcaccagagaggaaagatgggctttgctactgtgtggaattaatgctgtgatgaatttggcatgtgcaactcaagttctccaagaaaatagtactagtaaaacaaactgttccttacaaaagtgggcctaagagtgcgtaccatttaaagcccagagtttttatggcctggtataggatgctacagggtcatccagttcggcccgaattgaactagagcccatctcggtcgatttggttattactccccccatccaaaaatgcatatttctttgatcatcaccatcaaaaagaaattaactcatatattatatattatgtgacagaactaggaaactatatatatacatatacaaccaataagtattaagatagttttttcgattccgataaataatttaatttagcacatactccctctgtccctaataaaattaaactctagtatcccaagaagctactccctccgtcccataatataagggattttgagtttttgtttgcactgtttgaccactcgtcttattaaaaaaattagaattattttttttacttactttattatccaaagtactttaagcacaacttttcgttttatttgaataaatttttttaataagacgagtggtcaatgggacggagggagtattaagaaaagaaacaaaagaccaaaatactcttaattaatgtaaaaattgtattgattgatgggtaggtgaggggtattggagtaataaaatttctcgatttgcggattggtggtaggtaagaatgtaagagatggtttatttttggacaaacttcaaactctaggagagactacaaatctacaatatgtcttagacttttgaaaaaaaacaagaaatgaaataccttagacacttttggatagagaaagtaagagaatagttgtccaaacatatatgtttgcagttactcttcgtcgttcgtactaccgaattgatttttttaaaaaaataaataatatatctgaagtaatttggtcaaagcaaagtacagtagtactgtttctcttatgatcatttcaagtcaaataaataattaacgagcttattaatacgtgaggttttaggtaggtctgaacaaaatcgtgaacacaagaatatgccaaggaaagttattagttgtaccaacttactcaaatagatatagctaattcttcagcgtccttatgatcttctggctactttcaatttcttcaagaaataaagcatggaagatttctacatagagaacatgacacatgtaatatatatgctgatgaatgcattaccagcagaatagaaaatggaatgagagaagaaggggagtgaatctgtcagcgcttgcatcattttgactgagcaggatatttatccgtcgtctatatatatatatatatatatatatatatatatatatatcttctcaacaaccacgtaattaatcagcgtgctatgtcatcgaatgggaagttggtaagggtctcaaatatcaacaaaacctcaacttatttctgatatattcattacataacttttttagcagtaccacgtgttattatttgctttcatgtacgcgcgattatattttgcataagaaaggtacgtatcgtatcaggtcaattataggctcgagaacatgaagaattttcaactagctggttccaattaggtgaatttttgtcaactatataactatatatattgagttatttaatagatgacgcattgacttttaggcacatatttgaccattcgtctcattaaaaaattttatacaaattcacaagatatataaatcatgcttaagtgcatatttgaacaagacgaattaatgattaaatatgtgttcaaaagttaacaccgttatttattactccctctgtcgctaattatttgacaccattgatcttttttaaacatgtttgaccgttcgtcttattcaaaaaatttaagtaattactttttttcctattatttgattcattgttaaatatactactactactcaagtttttttaataatattcacaaaagtttttaataagacaaacggtcaaaaatgtttaaaaaaatcaacggcgtcaaatatttagagacggatggagtacaagcaaaaggagtttgtatttgcttcaactcctttccttagttcacttcctggaagaactgtaaattgttttcaccattcatgtaataacgctgcatgaatcaaaatttacatctcttttaggtgaattcaacatcgaccattttgattccccgcaaaagggaaaaccattgaccatttcaaggtcttgtttggaatatgctacatgatcttcacatgttcacataataatcttagaaaatgaattcaactgaacaatctatatatagtcctcgtaggggcatgataatgttttttttatttattgaaccttttttaaccttttattttacgaatatactctctcaaaacttattttcaaatctaaacttttttagtatgctaaccaaacagccgtgacgaaataatgctaccatgctgatgatgtagtagactaatagtgttatttggctttgctggtcttactactgtggcattgtggcaacataaaactatcacatccgctacgagtattatgatagtgttatcatactaggtaggatagtgtgatcaaaaggttcaaattttagaaataattcttgccataatttatttttgaaatttaaaacttaaaaaggtccaaaacatataataaaaaaaatgttgacgcgcattgactgacaaaagcccaaacgattcatctgtttcagcccagtcctctgtcggttagctggtctccggcgaccggcgtagctccgacggcgcggcgcagcctccacttcacctgactacactgccctctcggccatacctctccggccatctcgagccgccatgtgaaaaacgccgccgcatcttcgcgctgcgccactcgcggcgggtcgggttcgttcgtcgtctgagtttttttctgggctgtgccaccatgcagtgggtttccgccgttggttacttggtttaatatctctttagcactatatatgcagctttatctaaggagagttaattcagctgcgtagagccgcggattcgtgccagggtctttggtttgttattgtttactgcaacttctgtattatctgctattttattaaacctgtttgatcttttgctttttgatatcagaagcaatggatcaaatcgaatattagtacaggacacatgttcacatgtcacagtctgccaaattgatatctgaactctggagctactgctaatctactcacatgtcacagtctgccaagttgatatctgaacttactgctaatctactaccccaaccagggaagaagatttgctttcggcaatttgtgtccttgtgacatagacatgcaattcaagtactcaggagtattcaatttcattgctgtaactcaggagcttttttcctttatggaaaggtgaaactgtttgtaccttgatttctggtacagtaaagcgtatatttcctttttcatattctattatacagctcggattcgaagttcagcagaatcaattagtttctctagttccttgctttgatccaatattgtggcgtggctttgatagctcaggagtaacatgtaaatacatctataatcattttcactggcatgataaatttcatgccatgtattttgtttagaaccactgcttaaactgataaggaggtaatttatgaaacactatcaaaatagacaggactgcatatctagtaatctagcagcaaattgaacactttcagaaacattccttgtttggtatctgaatcaactttagctgcttatattacaccatgtagcatttattttacttgccatatactactaccttcatttcaaaataagttcattttacacccatctcacacataccaatataaaaccaaaaaagactggatgctccgacctcatcaaatcctagtgtaactatttttcactttatctactcctaatataattatttctacttttactccgatgtaatgattactctaaaaataaacttatttaatttgggacaaactgaatgagctataaatgatcttattacgggacagagaggaagtacaagctacagaatacggaccaaagagggtttgatggcaatgttcggacctttacgtttcttaagtttcgatgctagtataaatgccctggtggcagtattcatacgtatatatgctactaatatatgttcccttgatggcaatgttcgtacctttatgtttcttaagttttgaagctagctagtatactgttttgtttcatatctccgtcgaaactataaaagatatttgtgcagtgctcaacagcaagaaattcatgcatgcagtaggtgattgtacgttggcgtaaattgtgaagtggctgaaaagtgaaaactactaccaggttaatgtcattttctcatttccccataatttttcgcttcttgatattctctgactgcatgcctgattatgtttagcacttattcacctacttatccaccaaccttttcaaggatgatatctttggtcaaatttcaagatttgatctgatcagttttggaaggttttagctgtagttggattgtggtaagagaaacttcaggtattagttgtaccaacctattggcaggattaagtctagtttatcaagataaaaagataaaacacatatctgtcggcaagttctgcattttcttcaagcaagcttcaaaactcagaagattttttcttgatgtaagatgttgatgactgagaacagggcaactaaaggggggaaattgtcaaaaacctgatatggtttacgtctgactgcatagctgtagtcctcttatcaattttatatagttacattatggagatggaatctcacaaccaccacaaaattggaacggtcctgtgatcaaaataagaaggttctccttaatttgcatgcgcttatctgttcatcactccagaagagaagaccaggaatcttgcgttgacacaacgaattttaacccttgttctgttttacacaattcgttatataattcattgtggcacgtgttgtttgttcacatggagaacattcgaagcacatcgtgttgtttgttcacatggagaacattctaagcacatgaacaagattggtaaacttcatatgaccaaagttttccatcactttctgttttcattcaatttttcactttgtacatatgggagtccactataccatttgtacatgaactcttgacttttgtttccctatacctacttcatcatcgtaatcacaatatcttgatactttgttaatactttaacagagttgaaaaaatcgacgcaatcttggatcagctatccaactgttgcagaaattacttttttataggtcagtcagtatttcttgaagttgaagaaaaacaatcaactgtttccttcagtgacatctagccaatgtttggtgaaacatcttcagaaagatcgcgttacaattagtacgttatcaatgtatgctaatctgcaggggcggagctagagcgagatggagggaggtgccacttgtttaacttactctgctttatatcaagtttaagctaatgcgggtgtctaaatttgtatcgaggggggtacacacatggtgaaaataggtcaagtatagctacaaaattttcttgaccgggttcctgggcacccccctcaaacactctagctctgcccctgctaatctgagaagacagtcagcattacctagagggcaagaacaggcagtttgttaaaggattgaccaggcattttatctccttaagttccttgtgtgaaagaacaatatacgtatcgcagaacagactaccacgtgtctccaaccaccccaaattgtgactgtttaaaaattttaattagtgactaataataggcagtctcaaaatccaaaatacctgtatgcatcagatttaagagtgcactggaaatttggaatagctacctttcctaaggtccagaacttcactgcagggttgaattccacgagacattatgacttttgcgaacctaaaaactttctccatcctcatttggcttgacagcgagagggttctcctaattttacacgtgctggttaatttttatttcgagatttccttcaaaaaaaattatttcgagatgaaatcagagcttcttgtgtcttttgcccttggatttccacgcttcatcgagcagtaggtgctctggcaggtaaatccatatatatgcatgacttctgaagttcagagttttggggcattttttgtgcgaacacagttcagagttgggactaagtttgagatgagactagtatattcagttaaattaatacagttttatctaccataacgggactgtcaaaccttgcaaatacgtcgtgtcacattttcttcagcatttctaccatctatctccagttaatgccttcgttaactgttaccctggcagaacaattctaattccactccacgcatgaaactgcatccaattctcggaagaacgcaaaaaaaaaaaaaacgatcgtaaaactcggccgaaatggcaaaactcattggtgcagtacaggtatatccaaatacagataaagggagaaaaaaaaaggatagggcttcgaacgggatcacatccctgtcgtaatgatcacaatcgacgagtaaagtttgaccccaaaatttcctgccaatccatccacggcccatctacgcatcttcatctccctctcttcactgccacctacccacacggacagcgacatggccaagcccaagccgcgggttctgaactccggcatgatatcgccattctccaatctccacccacccagttcagtccacttccctatgccaactgccaaagtagtaaaccacccacgtttctgcccagaggagaggagtacaacataaatccgacatggcgacatgggtgggtagggccagtggcgaccggagaccgcgcgcgcacgagcttttgcactgcacacgccgagagccgagcgcgacggcgacgacgacgattcttcggaagatccgacacaatcctcgcgcccctccgcctaccgctctacgcatggaaacttccgtctgttttgttgtgcatggctacatgcagtgcgggtgttggttgaagaagtgttggccttgggtgtgaatgtgattaagaattttttttaggtgatatggccgcgggatcttgtacggggtaaaccaaccgcggggggccgctgctttgaagcgttcgtacgcgcgcccagtacgcatgcccgtgacaaagtacgactagtaattaatcttgcgcgcgcgacggcgacgcttaactaatcccgcacttcacctgtacagcaacaccaccttgtcgcgcgcgcgctatatatatatatatataagctgttgtcgcagcttcttccatcattagcaggagagccgagcgagagcgtgcgagcagagcaaagcctgggaagggaagcacagaagaagaggggctagcctgctcaacttaaagctctcatttgctgacaagacactgacctcttcggcgaatttcgtatatcgtcatggacgccggagacgccatggagagcggacagcgcgcggcgctcctgcccgaggtaatggccgccgtctctcgaatctcgatctctcttcccatctctcttcaggccacagtgcaaccatcgaccttgcaacacgtctcagcattggtgcagtttgtcagtttagtttttcaacagtgcgttcacttcatttcctcctcgcgtaccgggtgcccaaaatggcagtgcagcgcgtcaggactcgcgtcaggagacgagggaaaaaaaattgagatcagaagtatgcgccggtacatctatctttgaagaaaacacaatcttggctgagcaatgacgacagcaagaatgcagattttttttatggaagggagcaggtggcttagctcgcagcaacaatatttgaccaaagataagaggatactatgtttctcaaaagacaataaaatacacagataatcataatacacacagataatcataatacacttgatagatacatcaaacatgttgtcactatcagacacgcggtgcccagagaaggttccaagaaccggctaaaattatgaaacgcaagcacacacaccacaactactgtttcgtctacccttcaccaaatccctacgaggagtttaggggctgtttggtttctagggacttattttaagtccctgttacatcggatgtttggacactaatttaaagtattaaatatacattaattacaaaacccattccataaatttggactaattcgcgagacgaatcttttgagtctaattacgccatgactttgacaatgtgatgctacagtaaacttttgataattatggattaactaggctttaaaaaatcgtctcgcggattagctctcatttataaaattagtttttttattagtctatgtttaatactctaaattagcgtccaaacattcgatgtgacatgggctaaaaagttttagccccatctaaacacccccttaggaccctttctctttcttcctcacccgacaatcacaagcactgatgtttgcattacgtcataccatccactacttttcaaacacacaaattaatatgtgtcgattcgtttttttccccttttcttttctgatacgaagatgtgcgtgcaaattcagatattctctccttgcttctgaattctgataatattttgtgctattttgtctcaaattgcagagtcacggaccaaagactgaagatgatagcctgcaagtgccactcctcaaggataagaaacgcggcggcagcaaggcacctgcaatagttctaggtaagcattggcgcatagtaaaatctcgtttatttgcagcagctgcaatgcaatatgcatggaacaatgtgtcagtttgagctagtgctcactggatcgaggccggtgcaaatggtgcagggttcgaatgcctggagagcacggcgttcaatggcatctcgacgaacctggtggtgtacctggagaccgtcctccatggcagcaacctggccagcgcgtccaacgtcacgacgtggtacggcacgagctacctcaccccgatcttcggcgccatcgtcgccgacacgttcctcggcaactacaacaccatcctcatctccctcgccgtctacctcctcgggatgatgctggtcacgttctcggcgttcctgccggccacggcggcgctgtgcgcggcgggcgcgacgtgcggcaccggcgcggccgcggcgcagaccgtcgcgttcgtcgggctgtacctcgtggctgtcgggagcggcggggtgcggtcgtcgctgctgccgttcggcgccgagcagttcgacgacgacagcgcggcggatagggagcgcaaggcggccttcttcagctggttctacctctgcgtcgacttcggcctgatcgtctccggcgtgctcctcgtctggatccagcagaacgtcagctggggcctcggcttcggcatcgccaccgcgtgcatcgcggtcgcgttcgccgcgttcgtgctcgccacgcccatgtacaagcgccggttgccgacgggcacgccgctcaagagcctcgcccaggtcgtcgtcgccgccttcaggaaggtcggcatgaagctccccgccgacgccgagctcctgtacgaggtcagcgacaaggtcgactcccagcccaagatcgcgcacaccagcgagttcacgtttcttgacaaggcggccgtcgtctcggagtcggacctggaggagaggccggaggcggcgagctcgtggaagctctgcaccgtgacgcaggtggaggagctcaagatccttctgcgtctgctccccatctgggcgaccagcatcatcgtgtccgcggcatactcgcagatgagcaccaccttcatccagcaaggcagcgccatggacatgcacatcttctcggtgccggtgccggcggcgtcgttaagctccttccaggttctctgcgtcctgacatgggtgatcctctacagcaaggtgatcgtgccggcgctgaggggcttctcctcctccggagccgccggcgagccgtcgcagctgcagcgcatgggcgccgggcgcctcctcatggcgctcgccatggcggtggccgcgctcgtggagacgaagcggctcaacgccgcggcgagcggcgaggcgatcaacatcgcgtggcagatgccgcagtacttcttcctcgccggcgcggaggtgttctgctacatcgcgcagctggagttcttcttcggcgaggcgccggacaccatgaagagcacgtgcacgtcgctggcgctgctcaccatcgcgctcgggagctacctgagctcgctcatctacgccgtcgtggaggcgttcacggcgacggcgggcggccacgggtggatctccgacgacctcaaccagggccacctcgactacttcttctggatgctggcggccatgtgcacgctcaacttcgtcgtgtacagcgggttcgccaagaactacaagctcaagaccgtgctctcgtgagacgtcattgttagctttgcagctgcttgtcgaacacaagaaagattcgattacatttttgcacaattgccaagttgcgattggtgaaaggtagtagtacagtacagattattacagagtacagacacaattgccaattggcgattggtgaaaggtagtacaggaagaaaattagtgcagaattattttcccctttctctctctctctctctcttttaaaaaaaagtgctgcacagatcctatggcatgtcagcaacactttttttagatgatcattttttgttgaaagattacaggatatgattgccaatgtacctttttcatatgcaattcgatctaaggaaagaagtacttcattcaaaaatgaagtgttagagaatcgtttttgtcaaaatacaacttgtgtgacatttgaacagggggaaacaatggaagaatttttgtgtgacatttgaaaaggaaaaagtacaccgaaggtccctcaatttgtcatcgagttacaaaatcatccttcaaccgcaaaaccagatattcgacatcccttaactaatcaaaaccggtcataataggtccttcggtggttttgacaccggttttatcttacgtggctcacgagtcagcgtggaacctacgtagaccccacatgtcaggatgccatgccatcatcatctctttaccctcttctctcccttcctcctctctctctttctcaatccacgtcaaggtggaccgcgtccgtgtcgccgcgccaggagccgcttgtgctcgtcatctcggcgcacgcagcaagcggtctaggtgtcgacgcattgccgagtccaacccgcacacgccgccgatgaagaagaagaagaaggccaagaagccggccgcctctgacgccgaggccgacgcggacgcggacgccgactacgaggaaggctcacgactctggtgctgctgccgccgccgccatttctatccctttcccctcccctccacgactccgctgccgccgccgccgacgaaacctacacagagccacacggcggcgcgctcgaagcaatcaaaccaacaagcagccgtccccgccgaatcgaatagggggaagagagaagttgaggggaagcagcagcgcgccgatctccatcgccaccggcgaagcagcagcgccggcggcgtcctgctgctgcttccgccgcgtgctctgagcctcctctgactccccttagcccctcgattcccgtctcctcgcgagctcgtttgcccgccgcctgcgccgatctccatccatcccgcgagcagctgtgtcaccgtcatcatggtgagcaccccgtatagacgctcgtgcgaagccatccctcaccgccgcgctcgtcgccgactccatccccaccactgccttcgctgccggagcgaccatcgcgcaggtgagaaggagctcgctgccgccgcatcgccacgccaccccgccgcacgaggggggcgcggaggccggcgagctcgcgccgccccctggggaaccacggcggcagcccggcggagctccacagcgcgggcatgcaccggccgtgcgcaggcgtcgaaggggagcgcggtggtggcaggcaaacgcggcggaggccaagctcctagccctcaaccgagtgcggtggtgggaggcgagcgcggcggcggctgctgctggcgcctcgtcgccgcccaactccgacggctcccgccccctgctccgcttcgcgtggagaaccgcgagcgccgacttgctccgcttcggccaccacccgtctcggccccgttgcctccccgctgaagaatacagaagagaagaaaataaaagagaaaagagaagaaataagagatgatcgggcatcctgacatgtggagcccatgtgggtctcacgctgactcgtgtgccacgtaggacaaaatcaggctcaaaactaccgaagtatctattgtgatcggttttgattagttaagggacgccgaatatctgattttgtggttggaggatgattttgtatctcgatgacaagttgagggaccttcagtgtactttttcccatttgaaaaaggactgtgttaattgttacctggtaactgggcctacttgggcctcattgactgttcgagtaatttacggtccatgacaggcaggcaaagttagttggtccatggaacgctgggctcgcagcctgcgccgtgcaccggccttatcaagcccataaagagagagacgaaaaaagaataaaccgtgtgcccgtacgctctctgtgctcatggtttgacggagtcgccaacggagtcgccggcccgcagccgcaggtggccgagagaccagctaggtaggagagcccgcgtgctgcctacgcgatgccatctcaccgatccccaccgctcgcatccaaacggacggcccagatgctacgcatatcctctcgaactttctgggctgctggcttgcctcaagtccctcaacaaacgaacgctgcttttcgacgaagaaaaggagggttcctcgctctgacgccttgcgcagttgtaccgtacattcgtactaccacacagcttgaagaagaagagggaattcgacgagaaatagtagaagcttggcgttcgtgcgaggaattctcggtggttgatcgatccgtgtttcgcggcggatggggcaggcgttccgcaagctgttcgatgccttcttcggcaccagcgagatgagggtatgggtgatttttcttttttttgtttgtcaaaagtaagaagaatattctctttttttttgggtgtgttcttcgagaacttcttgattgatttttgctctgtgacgcttgctctttaggtcgtgatgcttgggctggatgccgcgggcaaaaccaccatcctgtacaagctgcacatcggggaggtcctttcgactgttcctacgattggtatgttgctgattactttgtcgcaatattttttttttcgctcatgtcctctgtgcgaaattcgaagttaaatcaaggctttacggttaaactagtcaagaagttaactccgtcggcagcagaggggcaaaaagaattatgaactccacatggattagcaagatgggggaagaatctgatatttctgattagcaagcatcgatttgcccttaagatagcaattatcctatgagagacaaccagttagtttgctcatcagactggccttaacgcttaacagatattatcatcatggcttttatggggttatttgaaaaatctgacatctcactttgctgggacactgattgatgcttctgcctttgtgctgtaccaccagggttcaatgttgagaaagtacagtacaagaacgtgatgtttacagtatgggatgtcggtggccaagagaagttgaggcctctgtggaggcattacttcaataatacggatggtttggtatgttttgtttcctttgtggttatctttttgggaatacgtgaaagatttgtgcatcgttgcattaaagaaggaaagaagtggttatttgattttgacagacttgtgtaatgatatagtattatatagccattctgcataggttattgtggttgactttgagacaaatatttcttagtttgacttattggttaaagttgtatggcatgtatgcaattgttttatccaaagtatccataaggctggtgaggttgctagatgatcctttgaacatttttaattaaaaaattaaatgcataccaatattgataccgcaaatatgtgtgtttaaaatctatggtaattcgatttgaatttatgtggagttatagaactcatttatttaaacaattatgatagtgagataacccaaatgagtggtatagaatttcccagttctcttttaattaacatgaaaacttacggatctagaagtaccctgtgcttggcatactatctattttcatgtaatggtattgtaatataatataatcatgcttaattatccagttaatggataatgttgtcgagtttgtcagatctttcactgtatgagattatagcaatgtttctactaattcaacacttaatgaattgctcttttgttgatactgtaaatgatatctttgcttgatttgatttggtttgatttattacagctgaacagagccatctttccagatataagctcattctggattattttgtgctatattacctaatgaagttactaattagctaatgttatgtctataatgtaaaccatactactcttcagttactaattagatgatgctcgtcagtaaaactttattctattttcttgttgatttgttttccttgagagatcggcgtgatactgaaattcggatgtattcatgagcatacccaactacatttataaattgtaatagcaacttattcctatatgttatttttgcacgttctgatttgcagatctatgtagttgattcattggatagagagagaatcggaaaagcgaaagcggagtttcaggtttaataagctattttaagttatgctcatcagatagcttgccttgttagtgaagctaaggtttggtggctttgttgcaggcaatcgttaatgatcctttgatgcttaacagtgtaatattggtatttgccaataaacaagatatggtaagtcaacagcacttgagaactccttttgtgttttaacatgaacgtgctctttttttttttttttttgcggggcaacacgtgcttgaatgcacatgtgtttgaaacctgtgaacatgttccgtattgccatccataaatgtatttcccagcattcattcatataacaaagaggattgttttacttctctagactgttgtgaacgttgtatgaaggtaaacaggtagtgttactcgtgagctgtttgcatcatgtgatcttttacattcgtggaaagatatgatgtcccacaatttttcatctataatagtgttgtaaagttgcaccttatttggttttgtgttgggttgctattgattccagtaatttagttcaatacacgaatggatgagattgtgcttctgtggcatgtctgaatctgatgtgactgcaccagtaatgctagttgccatcaaacataccataataggatgcaggttgccatattttttaaggatgatatctgaacaaatagatgatgacagaatctgaatatgcggtgaagcctttgaaactttttcataggatggcatgtttgccctctagtatttactactactagtaattagaacgatctatgccgaattgctgatcctgtctaatgcagcattcctttgttttgtcagaaaggggcaatgacgccgttggaggtgtgcgaaggccttggcctctatgatttaaagaatcgcatctggcatatccaaggctcttgtgccctcaaaggtgatggtctttatgagggcttggactggttggcaagtactctgaagggactggaagcctcaggtcgcctcccctcaggagggacctcattgttctaagtagcaggtctgcctgtaagattcttccgttgacactaacaatctttgcatcaaagatgatcatgggaacaaattatcttggtgtggaaggccttacatggtcacaccttacattgctcaggcgatatgcttcgcggtgtcgattctactgaaggcaaaagatgcatgagagcctgactacttgaaacattaccactgcagttttgtcatgggtagtagtgtagtagtacccatcgagtcttgtgaatttccttgaatgttacagctaactatcggatgcatttgttcacatgtgatgagtgaaacgcatgttgatgtaaaaagtttgtgtaaagttatgtttggcaaatgcaatttgtatcaacaaaatctgatcccatgacacatttctctgacggtcctacatcagaaccggagacaagaaagaaggcctatacttgcgtcgatgttggttggagcgagcctggattcctggagccctcgactggttggttggtcgcctgcaatctgttacaccaaacagtgcgcacggcaataatctgaaagccattatattctgggactgacgtgcagggatatacattttgaactaaatacacactggtttctgatgaactcaagtactcaactgatttcacatactgaattatagtaatctttttggcgaaacagattgtcaagttttttgtttattcggagcaaattgttgatgctgacaagcaaattgttgatgctgacaaatcgtgaatgaatatctatctgtatggtctactccctacgtccaaaaaaaaagacaaatcctggtttccgtgtccaacgtttgactgtccgtcttatttgaaaaaattataaaaaaaattaaatagacaagtcactttcaaagtattaatcatattttatcatctaacaacaataaaaatacgaattataaaaaaaatttcatataagacagagagtcaaagttggacacggaaactcagggtttgcctttttttttttttgacatagggagtattgggcaaacaattgatgttgacaaatcctgaatatatgaatatattactaggtacttcctccgtcccaaaatataacaacttttagctctcaatatttgtcccaaaatataacaacttctccacaacattttcttcccaaccaatcacaactctccaccattcacttttctcacatatcttcactacttaaccaatcataaactctccacgttcacttctacctactttcttaataaccgtgtccaactctaaaaaatgcttatattccgagacggatggagtatctataacatggtctaaggttagaaactttaattagttttgaaaaaattagtagcagcaaattttaaaaaaaagtgaaaaatctcctatcatttcgcagtttgaacacgaccagtacaaaaagaatcagaactgataaaaaaaatcgagctaagcgacaataaccggaaaagaaagatgagagaagcgtgacaacccgtgaggccgtgacagaacaacacacgacggcagccagagccagccgaggagaagcaagaggcgacgccgctggccaagtcggcccgttaccagccacatccacagaaaaacggggcgaacgcctcctcgcgacctcacctcaccccaccccccacccctcccacctccccgcgtgagggatgagatagaaaccgcgccgtcgcatgacgccatcgccggcggcgtccacgtccgcctctgacgccgggatgctcggccggcgcgtggtgatgctcccgtcggcggcggcggcgctggggctgcgccggggccgggcgcggatgcggctggggtgcgtgctcgagcacgtggccccgcggctcgcggtggcgtcggccgcgctcctgggggccggggaggtcatcgccgcggccgccgcggcggggaaaagcggcggggccgggcacgccgccgtggcgtcgacgctcgcgcagcttacggtcacggccgtggcgatcgcctcgggggcgtgcctgtcgaccaaggtcgacttcctctggcctcgcatcgagcaactgcccggtagctccctccctctccctctccccgtggtcgcttgtttgtgcatttgggtatttcattggagggttaactgctgaaacaattgtttatctaattatcttctaaatatgattaagtgtcatgtgagcatagctatgtgcttgagtgcttctatctcataaatgttatagtcgataagctcttaatctccttttaaagtgtataaatttgttatgtctttatttttcttagtaggaagtattttgttggattgtataaattgttatgtctttatttttcttagtaggaagtattatgttcacatgtaagattaattgtggttagcaaacaagagaaatatagaatgtagaagaataacctggtttttttattactgcttagttaattttttttcctggctttctggagtaagccaactatgctcccatttaagtaagattaacatccatttcttccctccctcatatttgttatcttgtatccacgcagacactcttatatttgaaggagtagaggtgactggatatccaatatttgaggacccaaaggtgttaaacaaatgatacattttcaataagcatttcttcagctgaatgttttcattttcgctctccagtttgattttctcaatgttatacaggtgcagaaagcaattgtttttgcaagtactgcccacattgggcaatttaggaaaacaggagatccatatgtcacacactgtatacatactgggaaaatcttagctgccttggtcccgtcaactggagaaagggtattactttccttgcgttctgtttattctttctagttgattattgcttttgttctggcttccccaacccaccattgcgtctcatgtaggcaatcaatacagttgttgctggtattcttcatgatgttattgatgatacagctgagaacttgaagagcatagaagagcagtttggagatgatgttgctagtttggtatctggtgtttcaaagctaagctacataaatcaggtgatgcatatgttagaaaaaaccctgttgagtgctgagtgcggacattgatttagaagggctagctgacttggcactatagttttaggatgcaatatattatggttgagagatgtgctgctcaagttcaacatgaatacatgatgttgcaacaacttgacagtcattgcaaacagccaaacatattctattaggttaaagcaacgattttgcatattgccaccactttgatagttcaaattgcaattaattttctctgtatatgctgaatcatgccaattttcaatctattgccttcagatgtctgaatgcagatctgtgtatacttctgggataatttagctcatgatatcctgttgtcgtatcaatcattaatgaattgtagatgctctcatggcagttatactttcttacactcaacattgtcattctgtttagtgttattgtctgtgcattgcagctactgcgcaggcatcgacaaaaaaacaccggtggaagcactcttacttcagaagaagtatgttctcttctatgctagcaaggtcatattgtgctaaagatgtcatgtcttcactcttttccgattatttgcaaatgagttccaaacatttattggcatgtatttgataatttcagattccatagaaggcatatactaatgttttcagaaaaccatggaattgattatcctcctgttgtcagtcaggcaaacaatctgcgtggcatgttattggggatggttgacgatccgcgtgtggtgctcatcaagctggctgatcgcttgcacaatatgcgaaccatgtatgtcattctaggcttctcaatactgtgtagtttgctctgctgattttattctttgcagccccagtcacttataaactatcctactctggtttatgacattttcattgactgtgttttcccttcaatttggcaacagccatttgaatcatctaggtgcattgacatcataagacagtccacctcaatatgaaccaacatgttctattattggaatgctcctttaacttcatggtgatttcaaatagttgctatactatgtatattttgtatcttactgaaagcagtatttcagctatgctcttcccattcgcaaagctgaagctgttgctcaagagacattggctgtctggtgctcacttgcttctcgattgggtgtctgggctttgaaagctgagctagaagatttatgctttgctgtccttcaggtttttattctggaatttattgtctatgaaagtgttattccttgctcaatacaacactactcatgtattcttctttgtcgacagcaagatgaacattataaattgtcctcatactttgatatttttgttgaatatggcgcttgtatatctttgtttttattggattagcgattacctgatggctttatgtctcgtcattgttatgttattataccttttttctgattccagggaaactctgtaatttattatggttaataatacgacatttcctaatctaaaattatcatgtatgttttttttttcaaacatattgatttgatttgagtagtaattctgcggtgcacaagttggtctgagtaaccagatcttttgcatggttgggtaatttatgtattatataactttaataaggagttgggttgacatctcaatgttttagaaggtttacattttctcatccaatataatctttagttgtacattaattgaattgattttttatgttaggcatacagatatataatattgttttgttcctcttcatcttgttggctgtgtgtcaattttgtggccccaaccattttatcttttggttttataagtttccttcctgattcggtctcactgtcaaatgcacacagccccacgttttcaagaaaatgcgatctgaacttactacaatgtggaattcaaccaacaaaactaaaagcacaagaaggtcatcaataagaagtggactacctgcctcaacaaaggatgtgcatacaacttccgtccatgattttttcagtctgagtaaccaagaaaaaccaaacatgaaggtgagtattgtaagatgcacatgtttgggtcttagtgaatcacacatattgaattgatgtgagttgacttacatggaattttgcaatgttttttcatttattctgcacttgtgcttcccacatgcgtctgcctctttcataaacatacatgaacaaaggcaatcaagcctacctgggagccaggtgatcacttgtgataaatatcttgttattttggttttttacctgcaggacttattgcaagctgtattgccatttgacctccttttggatcggaaaagacgatcctacttcctaaataatctccatggcagttctgaaacatctgtaccaaagcctaagattgttgatgacgctgctgttgcattagcatctttagcagcttgtgaggaagaacttgaacaagaattacttatatcgacatcgtaagttcagaccaatcttagtacttttcagaaggaatttgtctcttgttgtgtacatatgtcaaatctactagtagcattgagattctcatcctcgaattatgtgatttcttcaggtatatacctgggatggaagtaactttgtcaagtagactcaagagcttgtatagcatgtactgtaaggtaataataccacactaccatatgcacattggtgtatgatttgtttttttaagttcacgtgccatctattatgatcatacaatcgagaacttatgttggcctaatcataaggaattttcttatgtaactgcattccaaatgttggtttgcttatttgcttacatgttctataccaacagatgaaaaggaaacatgtaggcattaaacaaatctatgatgctcgtgcattgagggtgatcattggagacaaaaacggtgcattgcatggacctgctgtcaagaattgctacagcgtccttgatatagtaaacaggtttgtagcgaatcaagtatttaacaagaagtatttatgtcagcaaggaccaggcgcataggcattctaagaatttactacttttgcaaataaatgcttcattttatgtatcaattaggaccagtttatatccgtatttttacatgaaaaacattcttcttggcattttttcccacttttttctaagatccatgtttgagtctagaatttgctgaatagcacttgttccaatcaagaacttttagctatatctgattataacctttgcaaactgtctgctttatccatatatgcaggctatggactccaattgatggggagtttgatgactacattatcaaccctaagggtagtggttaccaagtaagaatcatctggcaccaaataaaatataacacgcattgataatttgaggcagtattcccagcaacctattgccagtataaatatattaggacgaaattgtccaacacttcctgcattcccaagtttgttcttccttgttatagatgcccaagcaaatatgactagctgtgcacctgtaccgtcaactatctagatttgaatcttgattttcttatccattactagatgttgcacagacttattttgtctctcttcgcttgcttatctgctggttgttttcctttctagtcactccatacggcagttcaggcatcggataactcaccactggaggtccaaataaggacccaggtagattttttgttcccgttcttccctttttttttttgaatagatctttaatactccctacattccaaattgatttacatatttgataggtacaccaagaccaagaaaagctaataattctctcatactatatttactctagcaacaaactcaatgtatgcaccatccccaatatttcctagccaataacaaatcaagatattgcatgtgggttataaatacttgtgtgcatagatgcatgcatcaatatccatttactccaatgcacaaataacgaatagactctaataaatgaacacaaatatgtagatcatttaggaataacctcaaaaaaactatatgtagatcaatttggaatggagggagtagtttgacttgatcctgatggagatgtttgttcgcagcgaatgcatgaatatgcagaatatggactcgctgctcactggctgtataaggagagcaaagttgactacagaagtggcacgagtaacaagataggacaaagtacatcgtacccatcaagttcttcggaagatgaaaactacatacaagatgttatgccctcaaagtacagttctatgaaaatggggcatccagtcctaagaattgagggcagccagttactggcagctgtcattgtcaggtatagcatgaatcaaaaaatgaactttgttgtttacccagaaagcttgctattgcaattgacacctgattatgttagttgatttgcagtatagataaagggggaaaagagttgcttgttgctgtcagttttggccttgaagcttctgaagctgtagctgaacgaagatcttgcttccagttgaaacgctgggaaacttatgctagagtttacaaaaaggtcaagctgataattttttttggtgatgggcactccttatgagaaaatgcttctatctaatattcaagcttatttcaggtttcagagaaatggtggtgtgcaccaggacatggtgactggtcaacaaacctggagaagtatacattgtgccaggatgggatattccataaggtttgcaagtgctgaaacattattatcttttgttcattacctcactttgtttgtttgcttccctttgtgtgttttcttctggtcttggtttgagtttcttgtgtttgaatagcattgaacttttgtatggggaactggttgtgcatgtgaatgtgtatgaattgaactgaaagttggagtggtgtaggatcaataagttctgttcatggggtttgattatgtcctgtatttgaataatgtgttttgcagcaagaccaatttgggaggcttttgcctacttttattcaacttattgatttgacggaagaggaagaggaagaatattggatggttgtatcagccatatttgagggtaaagaggcctcatctctgactcccgattcaagcaacactgaacgatcgacatctgaacctccaagctctactccattgagtgatcccatcaacaataaggtggacatattctggctatatctcatgtttattctgttttgtatagtccattaagaagatgttatagttctcttgttagtttgttactgcacgatacggatcagaacatacacccggattctcgaaatcagatagaaagcaacataatatgctcaatcctcaccgtttattcattatgccctgtaggttcatttgctcaggacaatgcttcaatgggaggagcaagttcgacgcggagcatcacttgtggagaaaagcctcagtgtaggcacatgtactgaaccaatccttcgtgaggtggccatcatctgctggccgtacgggaagataatgaggatgagcctaggcagcacagccgctgatgctgctagaagaatgggcgttgaagggaagctgctttgggttaatggccaacttgtgttgccccagaccgagctcaaggatggggatatagttgaagtgaggatgtagctgatgcgccatatctcctctgcccagggttattgataaaattggtttgaggttcaatcaactatgtagggtacattacctgaaaatcaacgaccctagggtcgtaacagactgaagattaagaaaacgtagaaaaccaacagcccaatacctcaattgtacagtccatttgtcgataagaatccaaggatgcgggatttatgtacaggaagtgctatatctgtacataaagctaccaactgtatgtatccttgtttatggttaaaatgtaaatttctgtaagtaaagttgtagtaatattagtcagtagttgacagttttctaggagctgcaattgttctgtacataatggtgaaccgttctatggcttgatcaccttggtactgagctagtgattgatgaacatggagtgagatatgcgcttggtctgtaaattacaaatcagtatgaatatttggacttccgatgataatatttttgcatattaaaaaactaaatttttagcactatgggagatgatgtctaaaactgactttttttccccaaacactagcctagagcccgtgcgttgcaacggaaaaaaacaaattgagtttctaccttattaaatcaattaataaacatttatattagtttaaccagtgttatgatttttcttattaaataaataggtgattttgaaatttggaaaaaccaatagttaaataggggaagacttgtcaaaagttggtgtaatagtatagattgtgaggtctaagtaaggtggaaatagataccaccattactaatattttaaatagtactttttttttcttaaaatataagtatttttagctataaatctggacaacagtatgtccaggtttatagtttaaagttactatatttttggaacggaggtggtagcagtatttagtatagataagtactattggtggtagtagggaaaaaaaaagaaaacaaaatgttaccgctagtagttttttttgttgcccgccaatcaattctcagttcacagatggaccaatttcacaactgctaagatcgatgtggttctaataattatccaatttaccaaatcatcaactactagtactccatccgttttacactatactccctccgtcccataatataagggattttgagttttttttacgtttgaccactcgttttattcaattttttttaaattattatttattttatttgtgacttactttattatctatattactttaagcacaactttccgttttttatatttgcaaaaaaaatttaaataagatgagcggtcaaacgttaaaagcaaaaacctaaaatcccttatattgtaggacggagagagtaagtcattttagcatttttcacattcatactcatgttatgtctagattcattaacatgagtataaatgtggaaaatacttatgaaacggaggaagtaataacaaacatggaagcgattattcacgatgttctaggaggaaaaacttcaaaacatgcatccgctcgcctctccaaaaattaatcgcctttccaaatttccatgggagagccgagaccgtcgtattcaactcctttgctaagcgtctccgggccccacatgcagtgacaccgcgagcgccgcaagtagtaacaaaacacaagcacagctaatccagattggcgaattgaacggcttgcatgacacgccccgcgtttccttccactcctgcgacgccgccacgtctcccccctttcacaggcagcgttcaaactttcgaaaatgagaaaaaaccctaggcgagccccgctcccaacggtcacatctctcgaatcccctcctatataaacccctccgccgcccaccccacctccgcatctcagctcagtacttgatccaccacccacaaatccgccgcgcccaaatcaggaggaggaggtaagaggagaggtaggtgccgagaagagatggaggtggaggcggcgacggcggcggccatggacttccacgcgctctcccgccgcgagctgcaggcgctgtgcaagcgcaacggcgtccgcgccaacatgaccaacgccgccatggccgatgccctccagtcgctccccacggtaagaatcccccctgattgattgattgattggtttgtttgatctgtccatttcgagggtttgggtgattttggtgtgggggtttctcgtgtgtatgttcgttgcgcgatttggcgtggtgctggtggtgattgatgagttgtgtgtcggttgcggattaggtggatggggtcgacgagatcggcacggcggcgctctgcctcccgacgccgagcaggtcgacgatgaagtcggctttgaaggccgccgcggcgatcggcgaggagcagcagcacgggagcccgctcccccgcggccgccgcgtgtcggtgatgtcgccggaggccatccggttggacgtcgaggagggcgaggacgagatgaagcgggatctcgtcaaggagatcgtgaggaccccgggcgtggcgctgcgcagcaccagccgccgcgcgagggccacgccagcgccgatcccgacccctgcgaccactaggcggaccgccgctgcgcgcaaggtggaggaggctgcgcctaccccagctactctgcggaggagccagaggacggctgctcggaaggccgctgctccggtggtggaggaggtcacggcaactaagacaacaactaggaggtctgcgagatcgaaggtgatggttgatttggagcaggaggtggaggacatggcggtggcgttgcaggaggtgaaggttcaggaagaggatccaaaaggtgagggagactgttatgctttttctgatcagattatttgtttcgttcgattgcttggatgagatttttatgcgagtttcgtcatcatgcagatgttgcttccgatgagaaatgtgatgaggaagaggaagctacgaaaattctgggaggaaacagtaaagaggtggaatcagaggagggtgaggaaggtgagattattcatggattctcattaactttcaaaaaagagtactgaattcgaatgctacgtgtgattagctatttcaatttggctgaatttgctgttatccttgtgcaaattgatgatgaaaattcgtgtctatgcagttgtttcttctgctgcaccaactgaacttgcagtaatttcagttatgagctgtgatgaccctaaggaggaggaaatagttgcaactggggaggaaccagctaaaacccaagaaggtgagatgcttcactctgttcttgcgtattccataatctatccatctttgctttatctgtaccaatgaagactgaattgtggagttcgaaaaacaaagcagctctgtttttttttctttacatgtagcgatctatatgaggttatgactaagaattgtagtattccaaatccatgcatctactagttgattcatatgtagagattttagattctgaatttgtttcattgcaaaacaaatccattcgaagtcacaagtttgtgagaattctgctcccttgccagtcatggaggattcaccaatcctaggagtcctgtcaaagccagaacctgtggaaccactcagcgagaagatagaagatgcctctgttggtgatggtctgggctttggtaaactgtccgcattgaaggagataactggtgagatgaatgataaggaagttgatgccgatgaggttccagaagagaagcttccagctgatgtgaccgatgacaagaccagcgaggaagatgacctcaacgaagttgagaaattatctgccgttgagataccacaggctgatctaacaggtgataaaaccagtgaggaagaggatctgaatgaagtgaaggaagggtcggcctatgagaatccgcaggctgatcggatagacgctgagagcagtgaggaagatgatcttgatggggattacagtgaagaatctgatattgatgaggagtccaatgaggaaggtatgcttgatgaggaattcgccgctgaggaatatgcctccagtgaggagactgatgatgagagtgacccctctgaagtggccactgattctgatgaagtggaagtagaaaagctgcaggtcgcaatggaggatggattgactgccgaggccaatcaggttgatgatgaagaggatgatttcagcggtgacctaccatcggatttcgacaatgccgacaacttcagtgatgatgaaactgagagcgatgccactgttgtgatctcatctgcttccaaggccgctgttgtgaagaccctggatgactcctccgtcactgaagcatccagtgaggaggaggtttctcaacaggaggtggaagcctcagttaactccatcgtgaagtccctggatgagtttactttcacggtggagggcacccagaaggatgagctgactgaagagatgaagagcacagatgatgctgaggatgtgggagcaaaggagttgaagaaagagaagaagaaaaagaagccgactgtccaggaacttaacgccacgagcatgaggaagctcaaaaccatgctcaaggaagagctaattgccaaggtaatgccatatttaagatctctttcgataaccatttcgtaatctcatatcattccatccccctgacacgttgttttgctccaattgaaggctgccgctggggaagggaagaggctggcgcttgcagagctggacgacaacgccggtggcgtcgactgctgatcgacgatgcggatggggggcgtgaggagctgcaaaacccaatgccatatgagactgaataaaatgaggagagctatagttgtgaagtgataactaaggcttcgtcttgctggcgtgagtacccaagttttagttgtgaagtgatacttaaggcttcgtcttgctggcgtgagtgcccaagttttagttgtgaagtgatacttaaggcttcgtcttgctggcgtgagtgcccaagttttcgtgtgtggggagaggcgcatcaggttgtgaaaccatggtttctctgaacaacctgcagtttgcgttggttctctctgtttccttttttctcgtggtcgttttgtgtctttgtatccgttccgtgctgagactctggcttggttaagccctaaatgtattttactgctatttacaagtaatcgagttctctgttactgctcatgaatgataaatatgtttcgattgttagaattgttatacggcagtatatgccattccaactgccactacttgtctacttacatctgcacctgcaaggagctgaacgtcttgcagtatatagccttgttgccgatgcatcgaatcaaacagcacatgaattgcccttgtttctcagttgatcatgtacttgtttctctgttgatcatgattgagaaacctaaccaggcaactttagaatttctactattgatctcacaaagctttggctgaaaaatcaactactccctccgtcccataatataagggattttgagtttttgcttgcaacgtttgaccactcgtcttattcaaacttttcgttttttatatttgcaagaaaaaattaaataaaacgagtggtcaaacgttacaagcaaaaactcaaaatcccctgtattgtgggacggagggagtatttatctgatattataattaagcacctggaatcgtaattcattacttatctgaaaattcttcgacattataatctgaaatatcttgcacttttttgcgatgctatacatttttgtaagtaatgaaatactcgatcgaactaaggcaaactgtctggaatttttgtccttttattttggagacgaaggccaacgtctaaacacttcccattattggccaactctcatgttttcggatgatgggccaactcgttagtcggcccatctcatctcaactcaatccaaggcccacacgacggcgttactcgacggcccagatttacccatcgcaaccgaatcaacgaccaaaccctaacacacgactcgcccaccagtatataacctcctcgcaagcgcaaactcgaaaccctaccttcccaaaccccagccaccgccgccgccgccgccaccaccgttgccgttgccgcctccaccacccgccctcgaccacagccatgccgccgaagctcgacccgacccaggtggtggatgtgttcgtccgcgtgaccggcggtgaggtcggcgcggcgtcgtcgctcgcccccaagatcgggccgctcggtctctccccgaagaagatcggagaggacatcgccaaggagaccgccaaggactggaagggcctccgcgtcaccgtgaagctcaccgtccagaaccggcaggccaaggtctccgtcgtcccctccgccgcggcgctcgtcatcaaggcgctcaaggagcccgagagggaccgcaagaaggtgaagaacatcaagcacagcggcaacatcagcctcgacgacgtcatcgagatcgcgagggtcatgaggcccaggtccatggccaaggagatggccggcaccgtcaaggagatcctcggcacctgcgtcagcgtcggctgcaccgtggacggcaaggaccccaaggacctgcagcaggagatctccgacggcgaggtcgagatcccctcagcttaagcaggtagaaacaaatcatcttttcttctctggttaatcgtgtatcgcattgctattttggatttacacacaagtaaagttgctagtaattgatatgaaaccttgcggtatgtgtaggtcactaccatgtgtccatgtttacttgtgtaattttggatttcagttgtgttctgtaagttttctgattgatgaataaaggtaatgtaggcagtagctgtttgccttctgaaattcaaggattgagattgctaagctaacttaatttgttatgtattgcgcacatgttgtttcttgattgctgcactttattatcctgtgctgattgtgacacacataattcatgtgcaggtttggcattggggtggttgttatgtgaggctgctgaagtagtttttctacctagatggttcctggtgcagtgcagagaatggaagcttgatctgttcttgttctgctcttgctcaagaagtaaacttttgtcatgcttaaagtggtaccatgtgagactttttttgccatgctatattgtttaccttgcgaaatcaatgttgttaatgcagctagatttataatattgagttttctttgcgatgttctgagtttttcgttatattgttgctactgcgtgcatgacaacaatgttctgagttttcgctctctagtcttggtagccaaaagcacttcttgaactccagcctaaattaaagtgccttgttatgttatgttgctgcatccaacactgatagatcaaccctaatcatgtgctcgctatctgtcactccttggtaaccagatacgaactaaactggaatactttcagattttgcatgcgatgctggaaattctgttccttggtaacctgatattgaacttgaaaactcagatttttcgtgagatgctggaaatttgttccttggtaaaactttcagattatgtctcccaaacctactatagtatttggccaaaataaaatgtttagacggtattgagttgcaaaatgttaccaaaataaaatgtttagacggtattgagatgcaaaatgttcagagatggcatctgcctagaacttgctatgttttactcaccgggaaacaagtatctcggatatgcgccccttgtctacacagtaaacttccaagagaatatccaatatgtggtctattcatcaatcaatctggcacatttgtgccaaatcaatagccatagagctttggcttaccctgagaaaacttcggcttcaccaggctcctgcacaaacaaccagctcctgcaacaatgtcgggtcagctagatgttaaacccgaatttaattgatttgctaaatgtcattctatagaaaacttcgagcaaaatcttacgaattttttacacttcaatccgttccacaatattgcgctacatgacctcctctgagatatttaactacttatcacttttagaccttacaattaaccatttgtcccctgaattctcatagatagtgatgtgataattaaccatttgtcccctgataaatggctaaacgtcaaatctaaaagtgacaaatagttaactattagcatgtgttcttacacttaaatccgttccacaaatttgtgtacatgaccttctctagccactttgaacggttaagcattttgatttggggtatgggtggagggtgacaaatagttaactattagcgtgtgttcttacacttcaatctgttccacaaatttgtgtacatgatcttctctagctgctttgaacagttggcattttgatgggtatgggtggagggataggaagagagaagggggaagatttggagtatgggggaaaaaattctctgcggcagtgtggcacgacaccactcttgtgacaccgagcaaactagtgacgcgtgtccaatattcctagtgcagccgagtccagctttggaagacaatatcggcttgttgtgcgtgcaaagagatagcgggagactaggtgagacgggggtgggaaagatgggggagactaggtggggttcacatcccctgcctttgggcataacggcaaactttgccgttcctccatcccaaacgtccatttcatatttacggctggattttgctggcccaacatacatcacctcaaaaattgctttcttctcaaacgaaagacatcgtcatggttgtggcccactatagtttcattttgttgcatgaccatcacgaatagctaatagtagcaatctagcacctacaacttcaagattttgcaacttcaagatttattatccacaatacagatcattagggattctttttcccagtggacatggaacaaatgaacagcatgagtatgatatcaaaaggaaacagcaagcgtttaatcaaacgatgtattgcattggagaagaaaagcagtttcttaattggaaaggcattatgttacgttacgttggagaaaagcaatttcttaattgggaagtctagcaaaatccgatcgtaaatatggaatggtcgcttgtgatttgaggaacggcaaagtttgccgttgtgcccaaaggcaggggatgcgaacccgactaggtgagatgagggaacaaaagagatattgtggaggcaaaggctaattgcctaattgggtgacagcggtgttagactagtctgtaggccttacaagcattagccgacaaggtgagacgacgacacaagagttggggggaggtgggaggcaacgacctagaagtgcgtctggcactccggcttggctatcgataacaaagagaacatgggtgggagggttatcgagtgtagtactttattctgagtttaatcatcaagagttaggcaatttggtttgagtatgaaccggaaacttggtaagaagctacaaccacgtaacccctccatctctcaatacttgtatttctatgagaaatgattgatgtgactaagtactttagaatgaattattttgggacaaactttaaactctagaagataactattttgtaggacggtcggagggagtacgtatgttatcacactcctacaaggtaaaactagtgttggaagtatagtgtattatgatacctatcagtgtggtgtggcatgcgaaactgatcgacaaaaatggttgagttaaataaaaaaaaacttttttggaagactttgttcaaatttcacctgttttcatcagttactgatcttactgacaaaagtgggtttggaggcagcacatttgaacacccttgggagaatttccatagggtttgagctggggaaacgaggggacccatcctgtagaagccaagcgataggtaatttgtaatttgtcgataggggaatagctcttttcacttccttttacattcagctaaaaatactactccctcaatcaaaaaaacaacctcgtacgggacatttcttagtacaacgaatttaaacagtgtaggatatgtcccatcctagtacgaggttcgcttttttgggactgagggagtaagtctgagaatgcattctagaatgtgcttaaagaacataaatatagacaacagcacgtaacacaccagtcacacaccggcacctacgccctgtttatattataaaggcataattatactatttttaaaaagatacctagatgtactatatgttctagtgtaaaatttgataggtatctaaaatttagatacatcaccatactttacttgacctgtttccgccgtgctcgctggtcaccaactcaccgtgactgcttcagcttgtgggaagcgcagcgcgcagccgctcggtgtagctcccagccggccagccctcaaacacaagtatacagaagaaaatccttgctgaaacaaggatcggtgatcactggaagcacatgtacacaagtatacacacagctgaaaaacccatgctgatcacacaaagcacaagtgtcaagtaagttacacggatcaatgtctcagcaactgatgaactgaatagagcacacgacgcacaagagatgcatctcagcaagcatcaccaatgtaacagacaggtcaatcaatctaacgactcagcaaacaggcagacagtcacaccgctcgctacggagttgatcctacattgttccagtagttaaattcaggggacattcagtcgtcgtcctcgccaaagtcagagccggcgaagtcggaatcatcgctgatatcctgcacttcgtcctcagtgtcatcatcgctcagctcctgcacctcctggtaactcttcttgttcccccgtgtttgccgtttcggcctcgctgcgactggctcggcagagctacctgatggggaggatgactcggtttcttcagtgctcgtggaagctgttgaggccctctgcaagacagagccgctcttcttgtggaagggagaggccctcatcttgcgcaccttcttctcaggagatggagcgctggtgctgctgtcctctgtaggcttgaacatttcttccatcactttctgcctcatggacttcccctgagctggcgccctcttcctggttgcagccttcggcttctcagcggcgggcttctttcctctacctttcttgaccggcacttcttccatggcgaaatcatcctcgtcgtcctcatcgatgggcactgtttcgtcttcctcgtcatcagatatcacagctagggatgatatggccttctttgctgctcctcttttgcttggttccttcctccctttcttcccttttgcctgttcttctgtagtctcagtttccatagctgcaagtgttgcaccatcagcttaaagttttgaaagtaacagagaaagagttgattttttatccacaaacacgagatgcattaccagtatcttcggaatggtcatcaagattgtaagcagccaatcggtcttttagagcaagaacttcgtcgtcctcgtcatcactcaactgggtgcttgcctatgaaattgtcaaattgaattgtaagagcgataaacaaattatcacacacaaaaaaggtagaggtttgccggagggaccaaccttcttagctggctgcttcttctgtgcggcaggtttcgggattgctgctatataatcttcatcctcgctatcagccaaacttgcctgtatgggttcaattcctatatcgttaaagatcatcatataatacgtgatgcatcttaataatcatcaccattctcacctttccagctggtttcttacgtggtgccgcaggttttggaaccgccggagcagcggcattccctgcaatggatgagcagacaatttagtactagaagaatccatctgggccatgcgaatagaaggaaaaatagataacagtaccgtcagagctttctgccgcctgagtattagtcgctgtctttctaggtcgtctcttgggcgctgctttattaggtgcagcgccacctccagcattcctcgtagctcttctctcctcagcatccatgctgtccttctcatcaagcgcctgaaaaaaaaatcaatgggtgaaaggtgaaacataaaacaataaacggtacgtcccacacccaagagtatcacagcttacatccagttccttctcgaatgcatcaaggtctctcatccaaagtgattttggccttgttctcttcagttcagctacttcattctccattctgcccttctctgcaatgagctgttgtaccctctccagagtcaatgtaccaattgccattgagaggagatattcataatcacttgaaccaacatttgcagcttcagggctctcctcattctcttcatcctcttcaatagctccaacagcggatggcccagccctctgttttttccttgggaaaggatcaaatcccttctgcttaagctccacaaacagctctgccctcttcctgttattcactatgatatctccttcgacaacagcaagaataaatctaactttgttagaaagcttctttaactccagttcaatattttccaataatactcgctgcacaacaaaagttagttagtgtggtattatgttgctaaaacaagatagaaaatgaacagactataaagatatgtacctttcttttctcgtagaactcgagcctcagtccaaagaactctttaagtactggaaagacataatttcagtgagaaactgaaaaatggagcacaacaacataattagtatagttatacttactgtcctctggagtatcgtacttccgaatttttccattagagtcaaataagtgcatatttgttgtaccaatcgtagttgtcaacttgaacttcttctccagcccttcttgcagagctatagccatgttttctttactcagggtaatcagaaattccacattcttgtcatcactataagtatcgaatgcctgtaaattgaagaacacaacttaagagaagatcgctggtaatcggagcaaaaaaaaatttgtgcaaaaaaactacctcgataaaaggttctatgtccttctccttcttttccttctccttgaccttacccttgcccttgcccttatccttgtctttgtccttgctcttgtcggttccaccaatagatattaaaaactctttgtaatcctgagaccagcgacggattggtagctcagtaattctcagcgtagtgtcatcaacaacctcaataataccagtgacagtatagctgacaccacccgcttttgtgcctgtcttctgaatagagccctgttgttcatgaaaacagaagttgcccaaatgcaatcattagtttaaaatagggatatacgctgctagtgtaacagtactctcagtcaacgcatattactgaccttgaaccccctataccatgggtccattggttcaacaggctcatcatttagcaaccgtcttagattagcaacaatatctcttggattatagtttgggataaaggtgctccatccagtgccaatgccttcacttccatttaccaaaaccatgggcaggattggcacatacctgaaggaaagtaggcatgtgttatgtacttatatcaaactatctttaaatagtattctggagaaagaaggctccaacagctgatattaccaggtgggttcaattgactgtccatcttcatccaagtagttaagaagaatatcgtcatccttagggaaaattgaacgagtgataggcgacaacagggtgaagatgtacctagcactagcagcatctttgcctccctgaaatgaatacaaacaagcacagtcatgagaagattagtttacaagctaacaaaatagcgaccccacaaaacagcaccgtaaagtaaaatccctttacaccgttgtcacacctgatctctggtgccaaattgaccattgggctgcaagaggtttatgttattgctgccaacaaaatcttgagccattccagtaatggtactagctaaactctgctcaccatggtggtacgcagagtgttctgatacataaccggaaaactgtgccacctgtggtgaatagaattaacagtgtcagtttaagtatattttatcatctcaaataaaaaagtttcaaaaaacttccaatggcacaaccttaatttccttaactaagttcctcttgaacgagcaaaacaaaatcttcctctggcctggtttaaggccatcgaccattgaaggtattgagcgcagcagatccgccatcgagaattgtatcagttccttgttgatgaagtcactgtacttgatgtacttaccttcggtatcaagatgggttccagactgaaattttgattatatattagttgctacagaatagtaattaggttttgtaatatggaaaaggatgcaagagcaaacctgaaagttagtaagccactctttcctatcagtaattcttttcttgctgaatgccaattcaatatcgttgtcatcttggtcattcttccagacaaaatccttcttgtgcttggcaatatcctggaagtactgccgaccctcagaggaagtgcttgttccaagtccctgcaggcaccagtgatatccttagctgatgacatctaacacaagaaaaatatacaatcgtgtgcagaaagccgaacaaacaacatgtgattcatcaaagggagaacagaccttgtagtactttatagaccaaccacttgcatttcctccaaggctctctttccattgttcgtactcaggcattgagtaaaatggcaggacaatctttttgtcccttttgttggtggcctgtgcaaatatgttcaagaattattattccgtccaaccaagcatgctttaaatatatgtaacccacagaaggatatgactccttcaaatgacaattttaagtacgatactttgacaagctgtaaacacagaaaataagcatgaaatataccaacccctaggagctgcctaccttgataataggagtaataaactcaaccaagaaagaaggaattttaataagagaaggccagaaggagtgaatgaagttgatcaacaggcctttgatgtgggaaccatcatggtcctgaaattttctattagatgagcaaaaaagcgagttgagttagactagttgaaatagattttagcatgagaaaaacctgatctgtcattatcatgagatggccatatctcaagccttttgtgctatcatactgcttcccgtgttgcaacccaaggatttgctttatattctggatctctgcattctccatgatctgcttatgacttgcttctctcacatttaataattttcccctgagaggaaacacaccatagtaatctcttcctaccacagaaataccagccatctgcagaaggaaaaaaaaggaaactcttcactgatactgaacttataaactacctttgttggcattatgcgggattttactactcacagctagagccttagccgaatctccttcagtcaggattaatgtgcagttattagaatccttcccaccagcaccgtttgcatcctcaagcttggggatgccggtaagtcttgatcgcttgcttccatcagtcttctgtagctccttgcttagtttgaactcagcccaagaaaggagattgaggacaatagctgagctaccaactgcaattgtaacaagtgaacatcgccattaatggtggaactacatttgaaaaaccatgttaagaacagtaaattgatcgcatacccttcttaaggaaatcatcagaaagttcacactttgatccaaagcttgcctgacgagtagtcaaggtctctttggtttgtgaatcaaaagctgggttgtcaatgagtgcattaacaaagacccataaatggctcttgacattatgtgctttcatgtgagcattcttgttcctcttattaacaatgttcatcacatgggtggcaatttggttagtgacatagtccacatgagtgccgccttttatggttgcaattctatttacaaagctaacctgtatcacaaaaaaaaagtgtaaggtgcaagtgtgaaaacatatcctgcaagggactctaggagcataacgcacctgctgaaactgcccttcgctaagactcacacacacctcccaccgatcatttactttctgtgaaatactgaaatggaagacatgcgaaagaggaaaaaaataaacaatataagagcatggacatccaaaaataattttgcgttgcaagaaactactgtcaaaccttgggagttcattgacatcgtctctgtccttggaagcagacttgatatacagtttcacataatcagagaagctatgtacaggcaccttttgatgatccaactcaaccttcacagttttgccaagagtgcctgccatatcaaccactctcttcctcatgagggctacaacatcattttcaagatgggtcatgttgaatttggcaaggtcaggcttgaacgtgactctggtccagttctctccttgtttgcacttggtaatctggggttcagacttctttcccatgttttcagagaaaacctgcaccaacaattcaatggtacgatttaaattatctatgaatattgcatttatcgtgtgctgtgatgttattattacatgatctagaaatggtgtttatcatgttcatcataaacctaaacaatggtagaaaaaataacccaaaaactctgattcaactctagatgttcagataactgctggagtaaaaaaaaactctgaacaacatggtgatatacagaagaaactaggaatgcccctaaaaactataaattatttttgttcaaccaaacattacatggatgctgaactacaaatctgctaacattctagtctcaaattccaatacgaaaagcaattaactgggtcaccgttccagtatctcattcatctcacagatccggtaagagaagttcatttctaagctaatccatcccccagatgtcagtactaactaaaatacgcaaggggaaaaaaactctggaggaacaaatgaatttaacctgcttgtacttcttctgccgacgtccatcggcggtctcaatcacgaactccgtcgagaagatgttggtgagcttggcgccataaccattccttccgccggtggtcttcttcacgttgtcgtcgtaattgctactggtgaggaggtggccgaatatcatctccggcacgtaaacgccctcctcctggtggatctcgacggggatgccgtcgccgttgttgtagacggagatgcggccctcgtcggcgtcgatctcgacgcggagggagtccatggaggggtcgcgctgcttgttgtcggcggcgttgacgagtatctcgtcgaagatcttgtagaggccggggacgtaggtgacgctgcggctcaccatggcgccgtcctcgtacacccagagctgcgcggtgtgcttctccaccgagccgatgtaggtgtccggccgcaggaggatgtgctccagctgcgtcttcttctggtacatctcctcgatggtcttgccgccgcccccacccgcggcggcgttgtggccggagctcgactggagcgggagcctcgcggcggcggccgccatggcgacacacagaggttgtgtgcgccgctagggtttgggtggtggaaatggcggattggggaattggggatctggatggatttagaatggggatacggggggggggggggggggggggtttaagttgaagcgccgaggccgacgagttcgaaatttgaattttgggtgggggtcacgtggcggactgggggaaccaagggtggagattgcggggcgcgttgatctggcggtggaaattgaactcgtgcgtcgagagaggtttctggattccgaggggcaggggcagccgggcagggcagggcagtgtggaccgtggtcagctactttgccccttttttttcactccgcttggataagggaaatttagtttgtgggccctccctgtaagaaaaccaaatcgaatcgttcaaagaatcaagaacatactcccttattacaacaaatctaaacatacctctatccgaatttattgtactagaatataccatatatagttctagattcgtctttttcgaacggagggagtatatactggtataaacattccagtaaatattgtaaatcgatgcctgtgtgaaaaaacttagggggtgtttagatccaccagtaattttttttgccccgtcacatcgaacatttgaacacatgtacggagtattaaatatagacgaaaaaactaattacacagtttatatgtaaattgcgagacgaatctttaaagcctaattgcgccatgatttgataatatggtgctacggtaaacatttgctaatgatagattaattaggcttaataaattcatctcgcagtttacatgcggattatgtaatttgttttattattagtctatgtttaatacttcaaatgtgtgttcgtatatccgatgtgacgccaaaaaatttcacccctaaatctaaacacagccttagtgtgtgtttagttcacgccaaaattgaaaatttgattgaaattggaacgatgtgatgaaaaagttagaagtttatatctgtaggaaagttttgatgtgatggaaaagttggaagtttgaagaaaaagtttggaactaaacaaggccttagaataaaacaactatacataaaataagtagtcacagctactatccatgtctagaactaatggtttattcactttgatattaaaattaacccttctaaattttgacaacaccaaaatttgacaaagtttgataaaaacaactttttaagtagggtagaggtatgtgggtgtttgtttggtttgctatcatgccaaatattcttgtatggtgttatgtggaaaagtttctagaaaatcaccaaaaaaaatggtagagtaaagtatggtggagtactagagtatttggaatgtgtttaaattgttaccttttgccaaaatttggcaataccaaagtttggtgtggttgaaaatgatagcaaaaactaaacaacttctagattatcacagctgaaaagcacataatcaaaggaatgcaattttgcattttcctttatttctatcatagtattaggttgtgattgaatgattgtttggttggctgatttacaacaaccaaggttcaatttgtaacggattattaaccaaattagagtactggattatctatatgttttatagatatgaactagatattttgatcaataaacttaacaaatatcaaagaatgaggtatcaaagcaatactgtagcatgcagcttctatgagaacgtatttttaagaaaatgtggaagaaataaccagcgacaataaacatatgaggcaccaacaagtggtgtagctagctggtagtacatgtgggcgcgggactaccctagattttagcctagagaccttaatccctactatcaaaataattttcttaggccacaaagtctgctaaagcacactttgatatttatactcttaaattgatttgctcttatttaatctttaaaattcatggatcatttgcaaaacgaactatacatactgatatatcatgcttctaaaactagttagtcagcctgacaactctagagtgttatatatttattattgcatttttgtcaagttttgtcttttttatcatggtgtatcttgcgatggtttatttgaattaggtggtctttaacaaattttgtaaatgcatactattagatagtatggtgatattgaaattgtagtataagcaggcacaaccatggacaaattttgtaatattcatagtataacttgtttttcatcgttagatttgctatctaccaggtacttggccactcctaatctttttcatcatccgtcacaggaaatataaccagctaaaaagggctagatggttgtttggttggttgcgttgagagtagcatcgctaggctagttctcgaacgaaggcatatgaagcctaattatagcatttgattttagttgggcatccaataaaatcttgcatttttcatgcttgaactcaagtgatgctccaaggaaaaagaaggtgagctgcaactggccagctggccaaaggtcagcctacccatccaattacaacaaccttaatcactgagcgttgttatccttttagtaaatcataagagcaggtacaatagtatgctataagccagctataaatatattttaatgggataaagaaagagagagaggagcagcgggctacagatctagtgctgtcaaaaaagctcgaggctcacgagcagctcgagcttggctagtcttaggctcgattcgaggtcggctcgagctccaaacgagccgaacccaagcctgagcaaaagctcgcaagctttactgagccgagctcgagcttataccgagctaaccgagcttgattgtgtatagtttatattgcatgttcacattattgatataataaactaatagataaatatatatattagtatctatttacacaataaattagcatgtgttagcacaatatatttattttagtcattttctactcttttattagtgtgattaacttaaaaaataattatacttatcaagagattatcattaaaatatatattatactccctccatctacttttgatagtcatatttctaaatctgaaaaatttatttttgataggcatatttcaatccaacaacctatcatcttaatgactttctcggatttaacgcatgactctccattcttccacacatgattggttatatgggtattgagaaatgtaaatattaatgaattgcttgtttacgaggaatgactagtagcatgtttaaatggatgataagtagaattacttatccttggtctgtgtgccaagatgaaatatgactatcaaaagtagatggagggagtactacttatggccgagctcgagctcgaagcgagctttgcctaaaagctcgaaggtgcaataggctcggctcgagctcgagcttagacagacaagctcgcttgagctcggctcgttgacagccctatacagatctgtagccagctgcagcacggactccaagacgtaatgtgtgtatgacagatgtgaccaggtattaatattatagtagacaactattgtatgaattggctattacattaactatagatgatttggagctagtaatgggctatactattaaacttgctctaacatgcacaaatagcgcataagcaaattcttagcatcgtgacatacttcacaatgcttggtaaatctgaagcactttcaagctggtttcatattgtaagactttctaacattacccatatttatatagatgttaatgaatctagacatacatatatatatatatatatgcatagattcattagcatctatataaatgtggacaatgctagaaagtcttacattgtgaaacgcaggaagtactaactagtatcgagacacgaaaatgttccaagtagagttggctattaaacgtatgagcattgcttataacttataagctcttcgacgatgtaactcaactggatctcagagtaaataagtctcgatgagttcaaagccaggctagaataacttacagaaaagcaaatttgaacaaaacatgcaacatgcttcaatatccgcacatggtaaaaccagcccctgttggcgcctcgtggagaccttggagaccaggacaacctcgcaggccaaagacttccacattccccagtcatctcgtcaaggcccctaatttggacgtcagtgaacgggcgcatcacaactcacacgcacggtgttgcacgcttcactagttacactacacgagacggacccaaccattgtccggccatgcacgcacggcctttcttgttcgtcgtccaagcttgcctccgtcgatcatcgatagagcaacgtgtcgacgcctgcagcagcgtcggcggcggtcgacaccctgcctctgccgctaaacccgaacgttagctgcctgaatgctcccctccccttcggcaaccgcacagaggccaacggaaccggactcatggaccttgccgggacgccgttcgccttctccgggaggaacacgctgatggccgtcggctgcagcaagcataaccacctgcgccaccgcgtgccagggcagctcagacgccatcgctagccactcctgcagctcacgacctgagcttagactaggcaatcggtaacaacagcagcgaggaagcaacaagaggcagcagcaagcttgctccaccggataaatgcaaggcgaatgcttcgactcgctcggggagagggctgtctctgcaattgccgtcagggctttgagggaatccttacctggatgtcgggtgccaaggtaagcgccttcttttcagacatttgcattgcaccttcagatatatagatactcctacttgtttccggagctggaagaggaagaccatgcatggaaagaacctgcaaactcaatagtattatatataagatgtcaacgagatgtactttcgtagtagaaatctaggaaggctaaacatgaaaaggaatctatttcaggggaatcacatgtaaatcaattttaaggtgtgcagtaaatcctagattttgtttagcttgtgctatatcttatctactacctactacctaggcgaataagcaatggaaaatccaggattcagattaatgctgttctatgctaccagttatgctatgataattcaactgattgcccttcactgtctttacagtggcaacttgtcccagctggactaaaggacctcatgtagttactaaatatctccagttttttcagcataactcttctgaagttttgatctttcatgaaactaatgttaaattatccatgttattactagacatcaattagtaccaacttccgccacaaaacaaggattacccttgcaccttcacacagtactgcaacaacactccaggaggatttcagtgctcttgcccatcgagcatgattgataatggttacaggtcagggacgggatgcactcccttggttttagttccacctccacctagtcctggtacttcctgtatatcctgtttgcaactttgttcaactacatttgtcaaagtcaagtcatttacagataatagggtatatcatacttactaagaacttattaacctagtcctggtgtttactgtacatcatacacagtaagcacttatgatgcacttctacaaataatagtgtcgagtctaagtgatattgcatttctgtttacagtaagcacttctacaaaaaatagtgtcgagtcttgtgatattgtattcctgtttacgcttacacatttgttatgttatttaaacaaagaaaaaaaaactccacaacacttcagagatagaaattattttcaatgcatgacatcaaggctatcagtattaacaacgaggatcaattatatatctattaggcttgtcaaagttgcataaaaaaaggaattgtagtatctagaaataaaattgtcagtgaaattcagctagttctaacgaaaagatcgatgacatgcctatcaacattcaacagacacatcctgtccttatccttattccaagttactggcattattttgattacacttgcgtctagattatcgccagttctgactgtctgcacatatatattctcaaaaagatatctcaattaaaaacagttaggcttagaaatagtactctccacatgattaattaaatagctttgattaggcatgacctacagcatcaggaagctaaaatatgttgattggttcctcttgatgcaggttcccccttgcaacgacaaccccaaggtttgacatatcctccaaatctattaattgtgcatacaatttagcatttgatggcagccttcaggtcgaagttttcttttggcaactatttttctaggacctaaagcatgccacagggcataagtggagatggcatgactaaggggaatggctgccaaacgggtcgaaagaacttccccatcactatggtaactcatcagcttctggagtgctacctttatttttaacctaaaaaaactacagattctgaacaaacagttgaaaaaaacataatatctacataagctattgaatgcaaatcgttttgtgatgttcatagcagagtaactgatgcataacatttagctcatggcatatgttgaatattacagtccaacaggtcaccatgccaaatctaaaccactgaatcgtgctaaatgaacatgaatctgaaattgaagaaaaataaaataagtcaaaaaaatcaacatatgcacttgatagtcaaaatgcagaggagttttacctgtagcaaactcatgcacctcgatctgccgcaaagcaatcacaagttgcagcatagcctgcaattattcattgttgtcaaatctcattagcatcactatagtctgtgtggcacattccaatgagaaaaaaaaaacttgttatctgttccaacctgtgcaggtgctattatcgcactgccagttacaataaccacgacagcatcatgtatctactggagttttaagaaaagagagagaaatagaaaaagagctgaattgttcaagaagaatggtggcttgctgctgcagcaaagatttgctgcattcacttcccaaggcatgatggacttgtcagcaaggctatttggtgcagaagaactcaaggttgctaccgacaactacagtgaaaatcgaattcttggccgaggtggctgaggtatacaaaggcattctccgcaataagaattccacagtgttcacagtgttcaatgagagccaggtggaacaattcgtcaatgaaatttctatcctgtcacaaattgaccacccgaatgtggtcaagctcttaggttgctgcctagagacacaagtgccactgtttggtatacgaatttgttcctaatgggactttattacagcatattcacagccggaatgctcattgctcttgcccatttgcaatttgtgccttctataccaattgttcacagagaataacatactattagatgggaattatgtggccaaggtatctgactttggtgcatcaagatcagtcccatttgatcagactcatatgacaattgttcaaggaacaattggataccttacagccagctcacagagaagagtgatgtttatagcattggagttgttcttgcagagttactgactacagagaagccagtatcatttgccaggccagaggatttgcgcaagctagccatgtactatttggtaatgttggtcaacaaaggttgcatacttcaagcagtaaaaccaatcattttggcagaagccagagaagagcaactatatgatgttgcacacctctcaattatgtgcttgagtctgaagggagaacaatcaacaatgaaggaggtggcatcagttcttaatgggctgagaaggtcactggccaaggacaaagctatcaaaggaaaagaagtgtacccacaaaataagaatgaagaagaggaatacctgcttcctggatcaggggtaggatcatcctccactctccactcttcagaaggaagtaggcaatgtagcatggaagttgaaatgatagcttcttgccatcttacaagatgatgtacttaatgtaatcttctaagcaaatgtatatatgttgattgaaaactcatacatatgtaagtgaacatatagaaggtctcataaatgcagtaaaaatgatttgcagatcagtagttttgggtaaaagagaagaagaaaatccaactaatccaaaaagtcaaaaccataaaaaatattgtggactcagcatatgcagcattttcctttcaaggaaatgagaggaagatcaccacttctctttgtgcctgtgattaccccccccccccccccccaaaaaaaaaaaaaaaatccttatgtgctatcctatacatcttaagttaaggtgtattgattctcaacttaaaaatgcatatcgaggataatgatatttcaatcagtgataatcatcataaaaacaagtaatcaacacacaagtgaaggttttacttattgttggtttattgctctagaagagacataaacatcgtgagatattggagtgaacaacaaatggaaaaaagattagctgaaacagggccagtatcatttaccatgggatgtccatggacagcattatagtgttatccatgtcaatatcattatggcctaaatttgacttctaatccgcaaaaatttgctcctgatagttctccttgctaagaaattggctatcattgccatccaggatgctgtctcctcagctttctcaactccttttcacacatcaagttcaattgcaacttctacatcctcggctgtcttcccctttagcctcgagcatttcaaaaccaactgaatgtcagcattaacatgcctaattccagcttccttaaccactgcactatcgataatatccaatattgattctgctgggcaagtgaagtaaaacgtgagcacatatttcccccttctggcctgtgataagttataggcttttcccttgtatttgtaagcagctcaacaaggaccacatgaaagctgtacgattcactcttatccgtttaacaggcttgtttcaaagcgctcaggatctaagtgtcctaatgtcccttggcccttgcactagggttgtcagttgttggccaacttgacaccccgttggaggactggtacatttgtagctagatgaagacaagagagtgctgatgcagtttcagttgctatccataaacgatgctcccatgaaatcagtgtcaacttgttattgtgacgggtacgggataccatagaaggtgctggtacttctagttttttggatggagctttcagctttggttcagttttttgaccaagcaacccttcttcttatcctacagcatgtgacgtcaatttatcatctatttcatggagcaaacttgcatagttgcatagagtaccatagaaactgaccgacggcacaggcacagttctgaacgagacgaactactactcattattaaaagggttaagacgacaactggtggactcatgggcctcgagtgcagatggccggcccaatacccatcaatactttccatttaaaaaaaaccaaaagtgcagcagaaaaataaataaaacataaactggacattccctcaaaaaaaaaaaaagacataaactggacatggcataaaaccaccggttggaacgatctgacctctagggtttttgaagatcctcgccgtcgccgccatgtatgggaactccggcgagggccccccgtgaggcggccggacaccttccctgcatcctccaggacgcggttagcagagtctccaccgcccagatcctccactcgtccggctacaccgcggcggagccagccgccctccgcgccctctccgacatcgccgggcgctacgttgcctccctgggccgcgcggcctcggccatcgccgaggcccgcggccgcacggagcccaacctcgcggacctcaccctcgcgctcgaggaccacgcgctcggcgggttccccggcgcgtccgaccccgcccgccccgtcctccgctccggcgcgctctcggagctcgctggcttcgtccgcgtggtgcgggaggtgccgttcccgaagcccgtgccgcggaggggaggggccccacgcggcaaggcgtgggagagcttcgcggcggcggggaaggagcctccgccgaagcacgtgccgcggtggctcccgcgctttcccgacaagccggagccggagcccgaaccaaaggcggcgtacgacgaggcgacggcgaggtgggaggcgcgcgttcgccacgaggaggaggcgaatgcagaagaagcggtggtattgaagccgagcgttgatggcggcggggagcgcaggggagtagtaccggagaagagggggaaagtgagcttccgcgtgcgggcggagaggaagaagcggcgggtgggattggaccagcagtgaggcggtggcttcgaacggttcgcggagaatcgagaaaaatccgcggcaatagtgcgggcggcgagcaaccaccgctcggccgtggccgtggagaatggagatggacgacacgccgcggcgttgcccggtgacccctgtccagtcgaggggttgaagaagacttgacgagttttgggctctgcctgggccacacgtggcgcctataggctactagcccacgagccacctgccgtcgtggctgaactggccgaaaaggtcaagtgtgtgggtgattgtacaagttataattgagttgccacagtttatcacaaattttggctttagtttgttcacgcggtgaatttgtggcgtagagctggtggtttcaaatttcacagtactctgcttgatatactaaaagatcaatttcttgttttttgaggacgtctgagatcaaatccacatgtatccctgaagactccctcggcgattcattcgatcatccctcctgagtcctgccttggattcgtgatttctcgtgggttcctcaccgtgagattcatcattttcatcttcagatcttgacttgtggagacgatgaactgggtaaccgagattcccatccattaaacaagaagaatcccttgttgaaattaaagcaggaactgagacaaagatgcaaggaggaaaggcaacagttcagagtgctttttgacatcaacgggatacagagaaaaactacattgttaacatcaactggtgtaatagttatgatatattacatcgaattgctacacatgcttataaacagaacatacagtcgaagaaactattaattctttggacagtaaataacaggcaaatctgaatataactgaggggattatacatgacatcagagaaactatgaactattgactatgagatgaatgcataagattagctaaatagacatcctaaaatgctgaagttagtactttacaggagacagctatgccaaaagccatttttatagtcaccaacactgttgctctgcaaagaatttcccctccatggagtcattggctcaactactgtgtgagaaccaagaagcactcgtgatgagagcctaaagggtctcaacctccagttagaaatatacaggtgctgttgatctttacatgtcatgtcaccactgctaattagttatcagctgttcccaagttatattgaagtaaccatgccatttgctctttactgactgtagcccaaatgactgaaaagcccgcatcttcgattagctgggaatgtacacgaaacttgcaggtccaaggctagcaaatcaacaccagatacatttaacatcacagttgacgcctatgaaggatctcgcaaggcaggactagccattctaacacggtgagcaacagccaggggcggcctgccaacagcttccagtatcctagtaaaggcaaccttcgcagggacacatgtgacaagtggaattccccctggtttgatcaagccgccaaaaatgccactctgcttatgtgcttttgcttgaccacctactccatgatgcttttttccagtggaaatggaagagagggttcggaccttctggcttgacaggcttgcttttttggattgcttcttttgagatttagaggctgacggcctcctaacatttgagatgcttttcttatcaaccttaacctgatgatttgaatttgagtactttctaaaatctgaatttgagtactttctaaaatctggtttcatctcccagtctggatatgcaagggtaccttcatcatcacaatccaatgcccctgaggggttagatcggggaattctttgcatggcagtcctcctgcctgtacaccaagcaggttgccctccagttctcccttccaaactaacatcaccacaaaaaaccaggtggtcagtggaaccatcttcaagtatttcaatttgaacaggatgcccaacaattgctttgccattcagtctgctcattaaggaaacaagaggaacatgctctccctggtagctagcctggaccttcaagtcaacatcaaacaacattgggcccctgccacgaagacgtgaactgtacttttggtagaatgagggtccgctccaatatgcattccgatcaaaatgaaatatcttatctgaatccctgtttaggggagaaaccttggaagaatcatttccatagtcgttaaaatagctgtagcttcggctaaaatctcttgtagccttcaaacatgaagaatatgttctaccatggtacaagttaacctctgaatgacctgtgtcctcaaaaaaatctgtttcttcggaatcgtaattgacctcttcgttttggtaaaaattttgccccagcaattgctgattgggaatttgcatactcccttctctgggatttctaccatttattttatacggagatccttccatgaaaccatctgatttgtctaaccagggatttccatctgccatatccgatctcttaggtgcattacggctattacgtttacctttcatatgccattgggagacgcccaactcagaagagccatcctcttctgattcattcacttgacacatataagaagaataggtcagctcatcagcatcagcatcaatattcgcatgcctgaacttgtcagaagctggtaagaaataaggatcatgggcatgtgatgctggatgcagaatcaaatccgaacctgcccaaaagatcaccacagtgatcaaacaagccaaaatcccaaactcaaaataaaacaagagcatagccatgaaaccatagacagaactgatgaaagcttagctagagctaaacagaaacaaaaacaaaggtacacttaagataatttgagggattatctaaatcatttggctatctcctttttcttggaccaggtcacacctcgattccaaatttggcaggattcattgtacataaccaacataagctcagataagtccttattgtcatataagttcagaataatagaatggctgctaatctgtcttataatatactgtacacaactaaaacttcacaacaaagtaagtttggttaaacccaaacggtgttgttttgttgtctcacaacctacatattgtttgagtcattgtcggttcaaaactttttaaaaaaaaagggtccagaaatgtttgggcacctaaaaaacaaatcaagagtgagcatatttgattactttgatgctatactgtaagatataaattgtttgaaccttatgcaacaacaataatatggtaacatttttcgcaatgtgaacccacgtgtgtacaagtaaaaattgaaagaagtattagcatggtgtgaacacatacattgtaaaagttcagcgtcatcttctgtctcactctcagagcattccctctctgaagactcatatatgtgcttctcaacaagatcagaagatgtctgctcctcagaaaaagcaggatgatgaagataactttcagtctcaaaatcacctcctgtagaagccacttgtacggaaggtaaatcactatgactatgagtttcaccagaatcagtaggtaggaatacatatctacttcttttagctcggtaattggcaggtgatcgatccatttctccctgagttaggacatccccatagccatcattgtgctgtgactgatgaggcaattttggactgctgtgcaaaatctgaaccagaggttggcgtctgtcacatttttcaatagattcatcaaaatcacttccatctgatctaatcttttccgcagttgtgattttctccttgctatccaaattttctccggcctgtatatgcctcacatgcgagatgtctcccaagtgattgccaaaaagattatcagaaatgccccgagtaggagaatcttgaaagtttctctttgagccagcatggaggacatattgctcagcttccttttttatatcagaagaagcagttatgcccttccgtttcttactctttttgctcttgtagcgggtacttccaagatctttgttatgtttagagcaaactgcatttcacaaagataattgaggttttatatccaacatactcccttgaagatcatgcaaacaatttagtcaacaatgaaggaagctaaatcaaactttgccaataaatgggcttaccagaaacgttagcaggtctggaaccttgagtctgatgctttgatgcaagcagcttcttctccaattcaagagcatgaagaatagcatcttctctacgtgcatacttctctcttttcttaacagaagtcccttcagtagcctctgccttctcaatacatgcatcaaactccccacacctaaatgctttgacgcgctttgatttttcaatgttgtaccagtcgctatggataagaaaagacaagtacataagtttcagaattcaaaatatacataggcaatcatgtaaccaaacaaacaatataaatgcatagtgtgactattaattcatgagaaaatagtgcaggtaaaatagaatcagaatgatttctaaaaggcaaggcaaacatttcaccaatttacataaagtcaaagttatttcccaaagaaccaccatctgtttggtttccacatagcaaacatgcaaatttctctacagaaccaaaatgctgaacatagcaactgtatagcaacctcaggaataaggaagcaatcttataatcctcctagtttattttcagttcttcaagaccaaacatggtcacactgaataccatgaaaacacatgtttagcttattgttttttttttacaaggaacagtttgcaggttatcagttgcagaaatttcactacacattttatattattatacattacagatataagttctttttcttttttctcagaatttaaacatcgaggcacattaaaaaaaactgacatggagctaaactacaaaaatagaccattttatgcacacagctatacacagattgcctctcgccttcttccgtccaagtttcaaacaactaaattactgaacaggaaaattgcatagcatctcaaatgcactagaggcagcaactaaccaaaaaaattacctagccatcagcaacagaagtagaaacttggaaacagatggaaaataagggaatcagaactcacacactggcatcctcacggccgagaagcttgaccggcgtgccggaccttggcgacatgatctgcgacggcggcagctcgtcgggccccagaatcctgccgggccaccatgacccgttcctccgccgcacccacacaatggtccccggcgaggtatccccaacgccgcagcaggccacctccccgtctcctcctcccccctccgagcaccccgccatccctcccccggccaccaaaccaagccctaaccgccgcctcgcctcgcctcgccttgcctcaccccgcttctagaagcttccctccctctcgagatctaccctccattcaaatcacggagggcgcctgcatctagaagccctctcctccgcgctcgctagatcgccctgcccctcgcgctcgctcagcgccccccccccccggcagcttctagaagcttctcagcgaggatcccaaggagagccgccgccgccgcctcctcaccccccttccccctccttctcctcctcctcctccacctccgcgaggcagggcccctccggcggcgccgctggttcgctgccgccgaggcggtcgccggaatatttttttccctcctctttctacgacagaaaagggtgggaaattaaagggcaaataaaaggattattttcttttttcctttcgggtagtagttttgttcttggttcccggtggtccgttctgcaagagagagagagagagagagagagaggcaacggaacggaaggtaaccgacgagtcgaaccaccgaagcccggaaggaggaggactgcgtggcgtaaaacatgagccggaatcgaatccaaggggcgcggacggcgcacgttacgggagcgcgggggggagtccatggcttccatgtgacggagtcgcgtctcgcctgcgggttttccgttctcgggcttgattggcacatgtacgcgaacaccgtgcggctgtacgcctgtacgtaagcacgcttaacgggtgtgagttttgagggacatatagctacataccacttttaagacgtggtaattaattatttatcactcatatagctatatgggctctcatgtgtccatgacatgtaggtccaatgataaataatttattccgagttttgatgatggcatatgggcatgtctaccaaatgttccggaaatatttgaatgtgtgtcaatggattttaatctagcatgtatagtacgttaaatattgtacaattataaaaaaatatttatttgaagttaatattgccaattaaattttaggggtagagtagtagatgtacactgaaattaaattaaacaacaacacacagagtagattctaagtctatcgtagttatagctggatagaaacactgggattgttgttttttaaaaaaatagttacattggatgggcaagggaagaggaaaatggaaaaaatatgatatgtgaaggataagggtaacattgatattgtaagtaaaattggttacgatatggttttacataacatcaacaatcagattcccataaaaatatgttagagacaatagataaaaagccacatgttgtttcggaagaaaaaaaagataaaaagcgacatgtatttttttatgtagggaaagatgtctgtcaactatcatggatcctaatacctagtgtgccttatgagttatggtggtcattacactctaaaaatctaaggataaatggggatcaagaaggtgcaatcgcgaacgatgatgtactcaagtagctacaccactttcgcactgcaaactcaacttgagcgttatggttgtagaatgaacacaaagttgtcccgcttaatggaatttagaatgctgatagattggtcatcgttggagctctaatccagaagctgcaataattcttagttatgcaaattggcgatggaaaaataacattattttgccatgatatatggttaactgcatctttattggcggaacactaccttgcactatacttgcatgcaacatctaaacacatcatagcaggtacgtccatgagacaatgactttgctcatctataatctccatgttatcatctatggcaattgactaatagtcgtaggctcttagctctaactagaaattgtagatgtgcgcatgagtcgtaacaaaggatgatgatgagacacaatgtgccacatgatgctcccatccctctaaatttatttactacaaatgtagggtgacaatagaggagtgacctaactagttagcgatttatatgggataataaggcggcgccaaaaataaccttcttgtatggttaatgtcaaaggagcatctccctatacaataaatctatctattccacaacaaaaatgacaaatacaaacaagttggatggtaaataagagtcttagcatgagataaatcttatctctactcaattcaggtttgtccaataaaatgaatttatctattcttaaaaaaaatgacaaatgcaaacaagtcagatggcacatagtcatttttcactgtaaaacattttccctgtaaaacaccggcccatgggacgatttaattggaatggcccatataaatggcccataagttgcagaataaattccattaggcccatatggcaaatactcagacgcttggtcgtcgagccagcctgctcccaacttttgggctgcttcctgcacattcctcacatgcgcaagccctaaagcccataaagcccagcgcaagccctaaagccagcaacggctaatttctcccctcctcatcgctgcgcactagccgttgcgacttgcgagttgcgatcgccgccgccgcccacctcccatgtcccatcggccatcgcttcctacaaatacgctcccctgtcgagaccctaaaccccacaaagcaagcatcgcatctctcttcttctccccccctcctcgccgcctctcccctctcgtcgatccgacgcgcttgggggagtcgacgctttctcttctcgcttgctaatcaaagctctcgcataattcccgtctctgtttcgttaatttccgcttgtttcatttaattacatagtcttcttagcgtgttgatttttctgtttgatcctgtgattgatctagtttacttctagtgatctttattgctgctggtattactgctgtttgtttccttgttatttgcgtgcttgtgctcttctgtttctgctaaccatggacgcaggctcccactcgatctcgtcggagaagagccacggactcgcgccgcggccgccgctccaggaggccggctcccgcccgtacatgccatcgctgagcactgcctcgcgcaacccgtcggccaagtgctacgtgagtccttggtttccccccgtccatgcgtgcgtatagactgttcgacgaaatgcctgaccgggtattgtgctgcgcgtgctctgcagggggataggttcataccggacaggtcggcgatggacatggacatggcgcactacctgctcacggagcccaagaaggacaaggagaacgcggcggcgtccccgtccaaggaggtgtaccggaggctgctcgccgagaagctgctcaacaaccggacacggatcctcgccttccggaacaagccaccggagcccgagaacgtctctgccgcggatactgcttctacccaccaggccaagccggccaagcagcggcgctacattccccaggtaacgcacgagctttgatgttccttcctttacattgatgcaacgatgtgggattgtgattactgatgcggctttgaaaccgatgtagtctgccgagaggactctggatgcaccggacctcgtcgacgattactatctcaacctgctggactggggaagcaagaacgtgctgtccattgcgctgggcgacacggtgtacctgtgggacgcctcgagcggatccacatctgagctcgtgaccgtggacgaggacagcggcccgatcaccagcgtcagctgggctcctgacggccagcatgtcgccgttggcctcaactcttccgacatccagctctgggacaccagctccaaccgactggttagtacattgttcggtatcctataatatttcgtgtcctaattcttgcttgatcagtacatgaatcagattgttctttctctgcagcttagaactctgagaggtgtgcacgaatcaagagtcggttcactcgcatggaacaacaacatcctgaccactggcggtatggacggcaacatcgtgaacaatgacgtaagaatcaggaaccatgtcgtgcagacataccaggggcacagccaggaggtgtgcgggctcaagtggtctggttcagggcagcagctggccagtggtggcaacgacaaccttcttcacatttgggatgtgtccatggcatcgtccgtcccatctgcaggccgcaaccagtggctgcacaggctcgaggatcacacggccgctgtgaaagcgcttgcatggtgcccattccagagcaacctgcttgcaactggaggtggtggtagcgaccggtgcatcaagttctggaacacacacaccggtgcatgcttgaactctgtcgataccggatcgcaggtgtgcgctcttctatggaacaaaaatgagagagagcttctgagttcacacggattcacgcagaaccagctgacattgtggaagtacccgtcgatggttaagatggctgaactcactggccatacttcccgtgtccttttcatggctcaggtgagtttcttcttgattagtagttttgcagtcactgcctataagttaatctgttatttgctgatcgtcttactgtgattgaactacagagtcctgatggttgcacagtagcatcggctgctgcagatgagaccctgcggttctggaatgtgtttggtagtcctgaagcccccaagcctgcagccaaggcttcccacactgggatgttcaacagcttcaaccatctcagataaggatgaaccaggtgaacaaattcgtctatttgatctggtcctttggacagcttaaaaatgatcgtgctggtatatttctagaactcgtatttattcctcgattgtttaaccatgttgagcctcaggctttggttattgatcttttgctcactgattttccttttgcaatgctcttgcagattgagatggccttggcacaataggctgtgcaagaagagcattgcagtgcttctcatgataatgatccaatcgtttcggttagtgtcattgctccctagttagcacttaacacaaatgcatagtacggtgtaaatgatctttgtttgtttcgtttgctagctttcaaacggaagatcgcaagtgagatttggcttcatcgatatcttcatctttgattggtagatactatcttcgacttcaagttcacaaagagcaccaaaaagaacctggaaatgtgcaaaaccttatcacttatcggggaatgaaatgctgagttggtgacttgagataggaatatatacttctggcaatttagttagttattctgtacattatctaaaaaaaagttagttcttctgtagagcatatgtaaagcacacacatagtatctaaaaaaattgatcttgttttaattgcgccaaaagatcaatttttgaagaatcttttggtggaaacatcaaatgatcggtttgatgtaacaaaacaagaggtgtagttcaaatatttatgtacgttcttcctccgtttcatatcatactattcaaaactagtcgtttgaccttttttagtcaaattttatctagtttgatcaatttttcaatacaaaacaaacatatttgtagtagtagtatttttgttagttcatccagagtacggacacatttgaccaaggttctaacttctcttaacagatagtagcacttgcattttttgttcatctgaagcagtagtagggctgaggtgccgtagtagggtataacaatattggaaatttgattgaaattggaacgatgtgatggaaaagttaaaagttttgatgtgtaagaaagtttttatgtgatgtaaaaattgaaagtttgaaaaaaaattaaaagtttaaagaaaaagttggtaactaaactagaccacagtagaagggaaccatgaggacaaacaaaggaacagtgattcccacccatgtggcccgcgaaatcggagcgggcaggattaggattcgaattccacccctcccttgtcgcgttatgcctctccctcacagcctcgctccggtctccgccttctccgccccgcgcgcggtgccaggctcgccggttcgccactaccgcacggcgcggcgcggcgtatggtggtaaaaaacaatacgatgacacagtagtggagagcacgagagattccgtgtgcccccgcggccgcgtgcaccagctcaccgtctgacttgctgcttcgccgccacccaacagccagacccgcccggccgggctaattctcggatccccttccgcgccaacgacacgcgcgcgcccggatgcatgtgaccaccgccatcaacgctccgccgcgcggacgcacgtacgttagctcatctgctcttgtggagtggggtttggctacgacgacgacgacggcctcctcggttaatctgctgtgatgctgctccatatgtacgtgtacgcttcacgatcctgtgttcgcttgcggtgatttggtttgaggctaattgccaacgaacgcaggctctggctaactactaacctaggaacatggaatgatgcttgctggactagagatagtactagcatatatatacaggtactggtggttgcggatgttgtctgttggcgtccacacagaacattacaagagatgagggtagtagcttagctaggtgtttgatgagacgatgatcagagctgtggcatctacagttagtaagtgctatttatgtgcacacaagtacactgttccggggagtatggagaaattgagccttcgataattggtgtcacaagctccgatcagaagtgataatttgttcgatggcatcagctccctcgctttaagcatacgattctatctccaaaactgaaacctaagtatgcgattctcttggatggggaagaagtttacttgcttaaaggggggataattaaagtgggaaccggaacaaagacaaacgaaacgtgggctcctcgaatctacatgcaaggaagagagaatcttatgctgaccaaagtaccaaaccatctctctctccctggctagctgtagtagagtagtaccgagtaccgtcacttgaaccacctaacacctaccgccgtttactgtcgcaggcatcggattccagcaggattactttggctatgcatacacaatttcatgtcttatcatcagctattcaccgtgggaattttattccaggttcccaattttggcttacacaccgatcgggccaaacgtgtgcactgatcctcacagcgatggactcgcaaattgcaaccgtgccgtcaccgtcgtcacagtttagacagcggctccatcgaccacaagataatccatccacttacgcaggcacctttctctgacgaccaacacaaattgcgtctcgtctgcatatctgtcgcggcagcgactgccatagtgccatcactcgcgggcgtcacgactccacactttacaaaaccagcacagttatcgcggttattacgtgcgataaacttctcagcttttaaaatcacgatatatctcatggtaaccgtgtagttacagtgatagttgttaaactgtgaggtggtggtaaccccaacccaaaacgatttagagaaaccgacgactcacgccgatgcatgccatgcctgcatgaacggcggcggcgatcgatcgggccggggaggaattgaaggctaagggagaaaaaaaaaaggagtattggaggggtggggcggcggtcacaaccaagttggcgcaaatattcctcccgggcgaggccaaggcaaagccacgcgacatctccccgcgtctctctcgccggccgccggccggccccaccgcatcgccccggctagctagcttagctatggctctcgatctcaccaccaccctttcgctctccgccccccggctgctacttgcctgccgccggaatattcttatattctcccccggcaaaacggaaggctaagtacaaccgcagctcgctgtcgaataaacgaccaaagagcgcatcgcgtattcgcgtgcgaattccatcggcacgaacgcgcgatacgcatggagagatggggttgatcaggccgctgttgctttcatcgatcgaggaaaaaagtaacgggattctctctcgtcctttgggttgagtttttttcacctggcaatgccacggcgcatatgcggttgaattgttcttggcatcatcgggtgtaaccgtgtaacaaccgatcgatggtcgtcgatagagcgcccggccggcgatgctgcggcatcgtgatcattgaccggtgaggtgacacctaatcaccggtagtagtactactattctttatgcaaaatctatacgtactcctcctagtaatgatcagagtatcagaccggacagaccagacagcttctctggccgacgaccgaaacgcagcggcacacatgaacacatggcaggggccgctcttgtcggggcgcgaggcgtccacgtggcgccccctcccacatgcccttcgttgtcctgttcccccccgctcgaaggacgctagtacgtgcacaccgctcgatccgacggcagcggcgccggcggcccgtccacgcggcgcgccgcggttgacccgcgttgcctctcggcacaaggctcccctgagattccggccgcgcgcgcgggcgcgcacacatgagctcatgatgtgaacgtgatgatggtgcgcggtgcggcgcgacacgcgacgcgatatgctttctctctcctcctcttcttttggctccgcctcgcgcgccactctcccgcccaggcgcctctctctctctctctagtttctcgcaccacctgcctacatatcgccacagccgctgtcgtcgtctcgtctctgtgtgtgtgtctccatcagacgccggccatatagctagcgagaccggcacattcccatcgggaatccgcctcgggcttcgccgcaatcccacgctaactcacgccgcaccagattcacgctcccagctacaaactcccagccgcgcgccggccgcacgcgcgtgcgcacagctagcgatcgatcgtgatcgtgaccgcggccgggttgactgccgctcgacgagcgcacacatcgatcagccggccggacgaggagattgtcagatcgtctcggctcgtcgacggattggccatcatgttcgaggggatggagagggcgggctacggcgtcggcgtcggcggcgcgggggcggtgggagccggggtggtgctgtcgcgggaccccaagccgcggctgcggtggacgcccgacctgcacgagcgcttcgtcgaggccgtcaccaagctcggcgggcctgacagtaagtaccaactccatgactccatctccgaacaccttgcaccatgtcagtatatgtcaccatgcccatgcttcgatctttctctgtgctacatgcgtccaaactccaaacacaatcgagctgctggagctgtaggccagcagaatttattagctgtgatgaatggaacagtgaaggaaattaaatcctgttcttgtttgcttgcttgtttaattggagcctttaattgtctaacagcgaaaaagaagcatgtccatgaaccatcatgagagatgccacagtgatccgtatatatgatcatgctgatcatcactcatcatcctcatctcataccattttggggccatgcatagttacatctgcatagtcctgtactgctttgtgacagcaactttatgctttggggttataatttcgttttccatttgactgtgtttggacagaggcaacccccaagtcggtgttgagactgatgggcatgaaaggtctcaccttgtaccacctcaagagccatcttcaggtctgatcatcttttttttactggtttttcttttgctttatttgcttcttttgatctaccacctacgatgctaatatgtgcttcttggcgacatctttttattgatccacagaaatataggcttggaaagcagaacaagaaagatacaggcctagaagccagcagaggaggtacatgcttttgtaaatactaaatacttctcactaagtactagtaacaaagatgtttttaaaaatgataaacccatcacgcatgattcatttctgtttcttctaaaccttacatttttcatgctctttgacagcatttgctgcacatggcatcagttttgcctctgctgcacctcctaccatcccatcggctgaaaataacaatgcagggtaagttagcagtcatcaccatgcttaattccagcttatgccaagttgattgcagtaagggcaatctaattttgactctgtcgcgtcgaaagcaacgccttcaagatcatgaagaggtgtatccgtgcaggactaacagcatctttttagttggcagggggggtacgagataggctttgtatatagagcgattggtcgtactatttgcgatttgtaaatacggtacaagtcatctactcttacagaagtaaatgcggtgcttaatttatagaggaaaacggtataggctgctaatgatttggaagattaggttgtgtgaaagggacactgtgtgctaaccgtctgcagatcaggtcaggtgttaactggtctgttgcgaaaatggaattttgtagtcatgttacatggtactagttccacaaaataacataaaaaaacagctaataagcagcacaaattgagtattcaggaatcggtctgtctctatactctgtcgaagcattattatacagtatactataaaaaatttgccgacagaattgcattaattcacttgaaacaaaaagaaaacaattgatcgcaatcttgcatctaatgcaatcactttctgaagtactaatccattttagaaaaaacaataagtattgtttgttttatgctttggatgagacgagcaattattcagtttggttttcaatgtcgcattcggattggcttataatttcttgaacaattttgtcatgattcagagaaacgccactggccgatgcgctgcggtatcaaattgaagtccaacggaaactgcacgaacagcttgaggttagattgccaatgcatcacccattagcttccctgcttgaatcgtagtgtagctcagaacacaaaaactaacaggtcaatgtgttgctccacgtacaggttcagaagaagcttcaaatgcgaattgaggcccaagggaaatacctgcagacgatactggagaaagcccagaacaacctctcctatgatgcaactggaactgcaaacctcgaagcaaccagaacgcagcttacagatttcaacctggctctttcaggattcatgaacaatgtttcacaagtgtgtgaacagaacaatggagagctagcgaaagcgatatctgaagacaatctcagaactaccaatctaggctttcagctctaccatggaattcaggattccgacgatgtcaagtgttctcaagatgagggcttactgctgctagatttgaatatcaaaggaggaggatatgaccatctgtcctccaatgccatgcgaggcggcgaatccggtctgaagattagtcagcacaggaggtaaagattcagtagaatggcgaccatctgtagtttaaattaagagttacctttgtcctatgagaaattcttttgtggcgatattgagggtgcttaagtacagtgttggtccagagtgtactaatgtaaaatttgtggggtaaaggctctgaataatcgtagctaatcaatcatgtctagatctgaatatcagaatatatacactgtatgagtattcgtacctgcactctaaacgactaaagcaaaagcattatcaagtcttgcaacagtccaaccacgttgaacttctggtcattttgtagtagaaaagaatccttcgtggtatcattttggagtaagcacaccacatcagatgatcagagcaatcaacggcaagcattttgccattttactacaggggaaggtctgactgaacattggtgtagtgcagctacaaccaagatgtgcagcagaaaactacatctgaaactgaaaggatggaactggagcttctgaattctgaaacagagctccagcattactgaggtaatttatatcatttgggtgctaaaaccagcagttagtgcagggttcaaatggatagtagcacatgtgaaattgaccaaacagataacaggacgcaaaatgattggtttccaactttccagcgaacagaacaaaatgcaccaagaatgatgcagtctacgctaaactgaataatcaatgtattaacccacaaacagtggctatcttatggtagggagttcaatagcataattccatgcacacatgaatccggatcacgagaaatcatgtcaactcgtgaacataagaacattgttatttgatactatttctcatgtatgttcctaacttcctatctactactgcggtagcacagatcaacagcaactcgtgtttcttggtaacaactgcagagctgagcaggacacaagccgccgtaagatttcttcagtgataatcgagcggggcagggatatccttgagatccatcccctgaaaatgaacatcctgcatgcacatcacaagcaaaagaacaatccagtcatcacaagccgtacacaaagcccacagcaaacttaggaattcacacgcacgtaccgacgcgaagtggttgacgtcgcggtggtgtgcctcgtcggcgcggacgacgacgacgacgtccttgagcgtggcgccggcggggaggcgccagtagtcgatggcgatcggcggcgcggggacgttctcgatcttgccggcctcgatgtccttgaggtactcggtgtaggagtggatggcctcctcctcgaggtagccgacgacgcggtgcgcgagcttgggggacaggaggtagccgaggaagtaggcgttgaagaagacgccctggacggcgagcacgagcgcgcgctcgtaccacctcggcttggccacctccatgaaggtcatgaggtgcatccgctcgttctcggcctcctccagcagcgcgcggatccagccgccgctgtgctcgaagcggcggagcgaccggaggtgcagcagcatgccgcccaccatccccggcaccgccgccaccgtctccagcatcatcgcgcggcacccgtacctcctctgcaaaatcgttccattgattcccatccatttcgatcagcaaaatagattggcatgatctttgatggaaaattagttgtggttggttacctggaagaagatgtcagtgggcacgcgcagcgccttgacggtccagtaggcgaccttgtcgagcagcaccttcggctcgtggtgcttcttcaggtcgatcgtcgtgtccggcgagtacgtctcccatggctgcaaattagcaaacacattaattcatcgacgcagttacacaaattgaattcagattagttaaattaacagcaaaaaagagaggaagcgatctttaagcaggatcatggataaatcgattcttactctgaagcaagaccacttccactcgacgccgtccttgctcgcgagcttcgacgcctcgatgccccagtagctgctcgccacgggactcgcagtcgcactggccggcccttccttggcggccttcgtcgcctccgccttcgcggcggcggtgctcccggtgttctccttggacgcggccgtctcctccttcgccgcggcggcggaggtggacagaagtcgcgcccacaaggccacgccccctccgccggcgccggctaacggaggccgctgcgcatgcgcatgcgcagccgcagaggtcgagctggagactcgggggcagaggtggcggaggaggactgatccagcagcgcgggagcccatcgccggagatcgtggagacgctgctctgctcttcgctgaggtgtgcgtgttgatgctctgttcgtggctgcagacgtgccggtttctggagggggctagcttcagcgtgcagatccacgtgtcggcgatttcgttcgttgctgcttcttcggatatacgaggctgttcattttttaaaaaatatatttaaccgtttattttattaaaaaaatttaagtaattattattcttttccaatcagttgattcattattaaatatacttttatttatatttttatttatatatatagttttacatatagttttatatattttgtaaaagtttttaaataaaacggacggttaaatatatttaaaaaaaatcaacgacatcaaatattatttgggcacgaagagagtattatactgggaaaaggagttcatggtggctgctaagcggcaagctgatagcatcatagcagtggactggtctttcgtccacttctttcttcgtattttctgtggactatatagttgctttctgtgtagaaataaaaaacgtgtggctgcgcacaatgatcaggtgacatcgatcagttatgtacgcggagatgattaaagcgtataacatgcgacatctaggagtagctacgaaaatattagaaaaaaaatatggggactaagttttttttcttttggcataaggttcaattctttctcattttttagcaaaatggcatcctaattacatatataaagcatatccactaatcagtctatttttttaagaaatccaataaaattctaacaaccacggtaaccttttgacatccacaatataccataagaatgagtcataagatattatgactagtcatatacattatgggcactagccataagacattaaatgttaaaactagccataagcttacggctcaaccttaagaaataaaataataagataaaatacactaaagagtatgaaaatagattatggtatggtaggacctaccttaaaatataatttgtttacatagatgtgagacacatcttaacatctattcttgtcttcaatattatagtcatggatatatggtatgatgggacctaaattattttcaccaagaccttaagcattgctgttgcccttaatatgggaggagatatcctgttttttcatattaaataattatagaaaaaaatagtttaacatgtaacatattacaacacaagcacataaattaaaatacgatatgcaacaaaatgaacaaattaaactacaattagttaacatatattcataattattttttaatttatataagttaaatttaactttacatgtttatcaagtgatccagcacaaataatatatatttttaatttttcataactatttggataacatataaacaatgagggaaatagttttgtttccaattgaatattaatattagtgcaccacctttttaaatcctaaatgaaaaaggtaaaaaaaacacaaattgaaagtttacaacacatgtaactaaggtgccatgattcctgtaaaaaaaatgccttaatgcaatacatgacaagcacgggattgcatgagcagcaataagatgtgaagacgaggtttgaactcacagtcttcattcaaaacaaagaaagagctttgaactcatggaaaaatttctccaaaattccaacagaatagtgcttccgttgattttcagtggatttcgttggattaaattctttttgttgcaacgtatacatgattctgcaggacttcttttttctccctatagttggactgcaatccaaattgtccattttccagttccagggcctaactgatttctgggcgtcctacggaaccaacggctcgtccggcgcggcgggcgggcgaatcacgccgatctccgggagatccgggttaacggagaacctcagccaccgcttcttctccacgaacctcagcgccggctgcagcacgagccccatggccaccgcgccgaggctcaccaccgccaccttcagcgtggacagcgcgagcaccacggcgatcagcgccgtcggcggcaccagcatcgccacgcacccggctgtgcccagcggcaccctgtatgggcgcgccgcgtcggggcgcctcacccggtgcaggatgaaggcgacgaactcgaggagcatgccgaagcagtagaggaagttctcggccgccacgatctcctggaagctcatcatcgagagcagcagcacgccggaggccgagaagaggatgcccgccagcggcgtgccgtaccgcgaccgcgccgcgaagaaggacgggagcatgccccgctccgccatgcccagcagctggtacgagtcgctgctcatctccgccacgaacatgcccatgttcgacagcgccgccgccgactgcacccaccacatcagccacgcgccgccgagcagcttcgcgatgtccgcgaagtagccgtctgtccactgccccctgtccagcggcacggctcccgtcccggcgaggagagggtacaggtaggcgaccaccacgaagatgaccgcgtagaacagcgccttgggcagcgtcttgccgggattcttcacctcgccggccaacgtgctgatcgaatcccagtagttgaggttccagaacagagtgttcaggtacagattccaatcgacgttgtggaggtcgatcacgagccacctcgccggccggagcttggggagcgcgatgagccccatgacgaaaaaagggaggagggagaagacgccaaggcagatcgccacccatccgacgacggtgagcccccggtaattcagcaatgtcagcacggccgtcaggccgacgacggcgaacgccctcggcgcgcctccgccgagcgccgggacgccggacttgaggtagtccaagaagaggacggggtagagcgcgttgtcgatgacgccgctcaaccacttcatccacccttgctggaacccccagtacgggccgagcgccgacgccacccacacgacgtacccgccgttctccgggaacatggcgcccagctccgccgtgatcagcgcctccgggatgctccagatgacggggaggaccaagaagccgatgatggcgagcagcggcccggccgcgcccacgctgtcctcgatcccgaacggcccgccggacacctcgtagaagatgaggaagatgagcgggatcatcgaaaccgtgcgtgccgacgacggcattggcccgccggcgtcgccgtcggggaggcccctgtactccgtgccgcactcgcccatcggagcggcaccgttcgccggttgggcgctctcgacggtgggcttctgcatgtcggagaagagaagaataattggttatctatacgaaagcattagcagaagagatgtattgttgagttgtagtaggcaactactcgagttcaacaaggagacccgcctgcaaaaaacacaagaaaaacacaatgacaagaacaaaccatgtgcatgtagccacatagtatgtttagacaaaaattcttgacgaaaccaggcgttttgtcagtacgaacgaagatgtaataccgaatcaaacaccaaccattggcccaccgtgtaatcttgattgtgaagaagggcaagaactcaccaccagaagaagctgcttaatccttcaatattctaatttggtagtctcaccggagggttcccatctcaagatcgtgatggacccgaaagaacagctagaacctgaagagggattggctcctttgctccgctctctttagcatctttcagaaataaggtacttgctgcatcttcgacgaagacatcctgcattcctactacgtatcatcaagctatcaaccaagcccgcaagtggatttgtttggtgaagcagcggcggctcacagagagctgagagaggtggtgccatgcggcgttcggccggtgacacctgttgcggcagagacggccacgcagtccgctccggctacacttgtaaactgcagggctaggtggctgcttctctcccgcctctccgctgcttcacggcccaaaagccttctagcacaaacttacaattgggccatagatgttagctaaggcccacgtctagcaaattgggccgaatcggcgaatctcgtcagccctgacagaccaagacatcgatgcttcagttccttcctggtccatggctgcaccgtacaggttaaaaagtcgtacgagatgggccgaatcaatgcggaaaacttaaaagatcttatcccaaacaggggtcagattgggattggtagcgatgcgacgagagaggggaaccgattagccgacgaagcgatcccggtgcacggctggctggcgaacatggccgcggctctcactcgcacacaagtagacgtaggagtatacacgagcagctaccggcggcaaaaccacgagaaataggattgagatggagacggggatcgagcgagctctcacctcttgcccggtgtcagcgtggccgagatccgccgccgccgctgccgtcgtagaagctgccgggtggcccggcgaccggaccgtggccagcgacacctccggccgtccgccggtgtccgccatggatcccccgatccctccttcctcctccccgtgccccggatgctggagctcaacctgattattattacgcctccggccgtgcggagtggaagcgcgcatccagcataaatagtggcagtacgtcgctttccagtttacaaattatcaccagcgtgagcataaagcgcgcagcacatttggactgaagttgaaccaaacgaatagaaaaacacacacgcggggaaaaaaaagaaaaaaaatcctcacaaagcgattgcctttctcgagagcaaatcttgcactgtagcgtgtgcacatggccagtgcccatctctaccgtttttgctcctacacgagacgagaatgtcagagtacgcggcatatgccaagcaaggccgtgcgggaacacttggctttaggttgagttcgagtttcccaactcactcccttcatttttcgtgtgcacgttttttaaactgctaaataatatattttcagaaaagtttatataaaggcgctttaaaaaatcatattaatctgttcttaaaaaatagataatacttaattgattatgtgctaatggccatttcgttttccgtgggagagtagccgtgcattgaataaaaattggtctcgagcagggggcgccgctaatgctagccccgtggtagtacaatactacaacgcagcagggcgattcaacccggaaacgatggaaaatcaggcatcttcccatgtgcacatggcaaagcaaggggcctctcgttctcatctgctgttatgactatctgtgcgagccgttccggcggctgtgataaccagatctagcacgtgatcaagcagtgcgatttatggacggatccccgcgacggtcgctgcgacgctgcctcttgacgggtcagaagttaatcagcaatcaggagtattcagctgagaaaaaagttcctaattgactgtcaacaaagtgacaagacttcagtcgactggctgagttagttcggcagggttagaacaactgtcaccagaattagaaaggagagaatataagttgaaaaagtgttaaaatgagcatatccgaataattgcacattgagcggtatgcctagaaagtaaagtccaatgcaactagaactggtttatctttggatctgattctgacggattactacaacaatagtatcgtttctttttacagcgaatcctgcctactcttgtagtcttgtgatgatcagcatcaacggacataaaaaaaatgacagggttacagcgaccaacattatctgaaaaaagaaatactgacagggaatgccgcttgcagtttcactgcgtggagtatattcccaaacgttggattcaacagaaaacaggtagtaaatcatattaccatctcaccaattccgccaccctaataatcgaagatatcatggtccatacctgttcccgaaaaaatacaaatccaaacggaagcaacccggcccaaaatcccaatcatagaacaaaccacacacatttgttggcatcctgaaattcataagcaggtcggcttctctctctcaaaaaaaaatagcaggtcggtttgtccgtcagagcttaaagatcacatcaagctgacagggcgaccagccaccaaccggggagagggagagcgagaaagaatggacaggcccgctgcctgcgcgcaccaccacctgctgctctctctctctcgcgtcgggggccagccaatacacttctccgctccgcatcaccgtcgccggtggggaccgcggcgaggcgatgctgtcgatggcaaggaatgtagagaacatcggccccgtggctcgtgaatgggaggggagatcatcttcgtgctttggcaggtctaacctaacggctggcaggttgcgcccccactgcatttgccctttttcttgttagcgaaatcactgcacttgatgtggtaaccccccatcatcagtaggagtaataattatcacgatccaacaacaccatcgcacaaaaaaagtccgcccgatttaaaacgagcttttgccgtatcggctcgcctgaaagcgtgtcattagcatgagccaaaggaaggagagggggtgaaaaaaaagggggcagaaaggaatactttcccttccgttggagcaaagcgggttaaaaaagggttgggaggcagataagaggggagagtcccggacggagcgcgatgccggagacgggacgggtttgaggttggggagtatggttataaaaagtaacggggcgcgacgcgggtagaaaccgtggtggaggcaaaggcgccgcgggcttggcttggctggcaccctctccttctcgtcttcggcttcgtcttcccccgtcaaacccacccacgccggccgccgacgccgccgccgttgcggcgggtgcttcccccgctcgcgtcggtgccggggggctgaggggaagagggggagggggagggaaggcacgcggctgacctcgtgggggaggggagggggggaacggggcgacaccacccacccaccgccaccatgtgctcgttgcccgcctggtaaggtatggtatctgtttcattccattgccccccatctttctcgtgcttgcgcccctgcccccgccgctgtactttcgcgtgccctggattagctggttggttcatctgcttgttgcggcgcgcggcggatctgtgcctccagccgccggatctgggtggttcgcgggcgttcggtgcaatgcgagtctgcgcgtaagtttttttttgtgtgttgtggtgaacagtggtgataattattgcagggtttttttttttatcttgtgggggtcgtgtccctgttgggacctcggatctgttcttgtttcgtggctaatttggattttatggcagaaggaagacgttttgtcacaatagattgagaacgctctctttttccttcccatggatggtcataatctgtgccttttggtgcttagcgttgtaatttgtgattagggtagcaatgcagattgtttcacatcatgttccaacccaaggcaatgcttctgagttacgaaatgtttgtaatatttatgaccttgctgtcttgccatgcttgatcgatcattgttgttaaattggatacccgcattacttccaattttttgcacttcttaggtagttaggggtataggatgatcattccatgtcgacgccttattgcaactgattgaatagtagcatcggtgtcaatattttgtcaatgcagcagcaacactctaccttatcaggcaatgttacctatagtgcatttttttttattctaggaggaagtgtatttgattgctgccaagaaggcagtgcttcattttgcacacatcagttttggtacttgcatcatgtggcctgtacatcattgtttgcaaagaagagaaagctgaagcgctataaatccttcaagcagttttttcggtctaaacccagccatatctgagtatgttagaatgattattatgtgcaaggtttctgtcggttttgattgtgatcctcagacataccttgtgacgcagatattcatgctgagttgattccttctagtcactttgcatgtacctatagtttgaacatgtgcacggaagtaatgatctttgactgtgttatatgtttctgacttaaatctgttatattagattggaccagctgtgatttggggagcttaaagttttgatcagagacatggaaaaagtgatcttctgggcacatctccttaaatgcaagctttttctttcaaaagaaactcttgattggtgtgttttagctcgtgggaacacccaccacttctctctggtgaactacacatagtggttttatgctcctttatgctcaagaacatttggctgattcaatctttttcctgaagccatatttcaagtctgccaaacatctacatgtaatgcacctacttcatagcttgttcttccttcattttgtgtcatatggactaatttagctaaccaccatctttttattctactagcacgtcatctctaaagaagcttcctttaagttgtagatgctgatcatataagctgggtatgcctctttttactgttcattgatgcatttattggcatttagagaaataaattcttgcaacttgaaatattctaaacaacttactccttcccttattttgtagggttaatacctttgctcatttgtttgtcatctgttgctccctagttaattaccactagtgttgcattgaggtcagggttcatccttgctatagtatgcaactatatactatggttgctgcttgatcttctgagtgaaccaagatccaagaaaacataaggtgctggggctactgttcaattgactggttgcatatatttgttcgtgctaatcgatagactagtcaattggaagtggtggcaaacacctgtctttgtgacttggctgtccaacaggaaaaggctagcacaaggctgacattgaccggcataatggacaggtaactttcatattgacttactatttttaggtcacctttttcttatcaagtatgttgtctttgcagattcaaaatgattaaggaagttggtgacgggactttcgggagtgtatggcgtgctataaataaacaaaatggtgaagttgtatgtatctgaagataaatccataggaggaaatatgcatttcatacttttgcaaaatattcccagtgaaataaataactgattgtaagcaaaatgtgcactgatctataggtggcagttaagaaaatgaagaggaaatattattcttttgaggaatgcatgagtctacgtgaagtaaaggtattttaactgaaagatgtaccctctttcctgctatgaaccttcaactgatatttctcctatattgaagtctttgcggcgcatgaatcaccctaacatcgtgaagctcaaggaggttataagggaaaatgacatattatacttcataatggaatacatggtacttaaggatgtcatataccgcaaaagtttaattagctctgtatcgcttttgttaagtctcccatgttcttccaggagtgcaatctctaccaacttatgaaggatagagtcaagcctttctcagaggcagaagtccggaattggtgctttcagatttttcaggctcttgcatacatgcaccagaggggttactttcatcgtgacctgaaacctggtaggttctcttgtttagtcaacatcttcacctatatttctgtggcaatcaaattatgaaactacggatgagtatcagatgtaggtatgcagaatcagggtattattgtattgagaatatgagacatttagcctttatttttaccacatctactttgcaaactgaccgagatatactttctaataaatatatactttcatgtgggattgtattgtgcttatagctatggcactaatcactgtactaatgcagagaatctgttggttagcaaagatgtcataaagctggcggactttggtcttgcaagggaagttacatccgtgccaccatacacagaatatgtgtcaactcgctggttagtagcactctactcgcacacgtggacacaaatcccttttctttgttaatgttgatccacatgtgtttgaacatctcaggtaccgagcacctgaagtattgctccagtcatctatctatgattctgcagttggtaaagtttctactatctactttgtattttggcacatatagtacatactaagtcatgattggatgatcccctttttgccaacttgcagatatgtgggctatgggtgccataatggccgagctgttgacacttcatcctctttttcctggcacaaggtataatatgcatatatcatatgtatatgcattgttgttatgatttgtagtcacgtatctctctgtgtttgccatgtattttgggcatctgttattctgtctctcttattatatttcttctttgtggtggtcatatttgctcattgctgttctctttatccaactgtttagtgaggctgatgagattctgaagatttgcaatgttatcggtagcccagatgaacaatcatggccacaaggattgtctcttgcagagaccatgaagtttcagttccctcaggtcagtattcatcttccccttttccctttgcctatatatgttttcttttgggggtaagctctttgttgtgattatacttgtttctgaatgtgtcatgaatctttgatatgtgttgagcccattctgcaactgtttattttaatcccttggtcattctctgatgaattttgtccttgtgcctccctatctctctagacaatggtggaattatatcacttcgcatgccttacaatctttcatctccattagtccattgcctccttttcctcgcatattatcataggtttaaaagcgtagtgtcttgttctaacttgattcatgagtttgacatagattgtccataaatagtggcttaacacttaactaatctcatgtggatcttatcaatgcaggtcagtggcaatcaactggcagaggtaatgacatcagtcagtagtgaggcagtcgacctgatttcagtaagttctacaattctgttgccccagatggcgtacttaaaatctttagattattttattatatttgtttctttctacatctgcagtcactgtgctcatgggacccttgcaagagaccaaaggctgcagaagttctccagcatactttctttcaggtaaaattactattcgaactccgttgctgttgtctgtacctctgttgcagaagataaatcaaatttatttttgccatccactagggctgtacatttgttccacctactgtccggtcaaaagctggagtgctccctaaaacgcctccatgtggttagtttccacactgttttgcctcacaaccttggtgttcctggtactcttgttatatctatgatctatttgtttcagttggagtaaaaggagtttcggagcacggcatgcctcgaagatactctacaggaactctatcaacaaccaaacctcatagtaatgcatctctgaaatcaagtggcttatctaagaccggtaatatgtttaatcttttttctcaattgcttgttagcttgcattgtaggctatatttttatttctctttccaccttccaggtgtacaaagaaaacttcaaatggatcgtcaggcgccacagaagattaaaaaacctactgagagtaataataaactaaccactaatcgagtacctgcaaggaatagcccaggcaagtttccatagttgctttatttgaattctacatcaatttgtggttgactttgaagatttacattccctttgtggcaattataggtcaccctgtattaaggcattcacgcagtttacctgaaactggccgggcaacaatgcacaaggtttcaacccttaccgagagattaactcatatgtctgttacctctcgaacgcgtactactcccaagcctgctgccccgttactgaaggctgggctcggcaagtctgacttactgggaaaaacagacgaaatacctcctgcaaagaggttgacaagaaaattagtaagctaacgtagcagcatccatacagtggaagctggttagctggtgcagagaggtgttataagctacagagcaaaatcccggtctgctgaaaatgatggcactgccggagtgtttgccaaatttgctgcatccaagtgccatagtagaataagtcgagcctgccgatccacgtggatctgcttttgccccaagtttgttccatgtttgaatagaacatgagtgtgctatatcgatttgaattgttgtcgaccagtgttcactcgcatatgcggtctgacaaatgatagacccgcgagcaggaggatgtttggcttttgcttgtacagtttatgagcttttgggtggcggtcaagtctttgtcgggtccttggcaaatgatacaatgcatagtctggttttgacttcgtctgtggctctattcaggtctttgtttgaagatgatgtctcatttctcatgaaccttcgaatgttggaaatgacctgattgtatcactatcgtctgctctactttggacgaacctgctagttgtgcatgaccggtgcacttaacaagcaatatatacaccattctaccgtcgaggatcacatgaaaccatgctaaaacaaacgaattaaacgaacaccctgtccataaaggttacaaacggaagaccaaagtggtcagttaacaagagtagcagcttgactgagcctgctgcttctcagaccacagcatccttccccctcatcctatattcaccctgtaaaaaaaacctagtagcactaaccgtagcagcggcaaagtagtagtatcatcacactcttaactattcttcccggcgacgcgttagcttctgtcacagtatcacttcactctcatcaacgatgggtctcgcgttagctcacagatactgcgcgtgtatccggtcccggttctgctcccaccacaccttggcccgctcctcgccaaatctctcgcggctgcaacgttgcgcacagagagaagtgttaaaaattccacgcgaacacgaggaaaatccagcgtgatctgccggtattggtgacgtgttagcgttttcgggatgtgtgtgtggactgtggagtggcttgcctgaaccggacgcggcggagctcgcgggtgccgtcgccgaactcgcggatggtgatggacaccccaggctcgtcctgctccacccactccgtggcctccaggtcgctcgcgttgctgatggacacggacgcctcgtcccgggacgacgtcgtgccgcgcgacgggtcgtacggcgccgctggtccggcggccgcggagttgaggaggttgaagtggtgcgcccacacgtggtcggacgggtccggcacggccgtggacgggtagaacggcggccgagccgccgccaccgacgacgacgacgacagctgcgccttgctcgacgctgtccggctgatcgggtgctccctgccagcacccgacgacggcagcggcggcggcggcggcatcatcatcgccgggctctccctcgtcgagccgacgcgggagtagaacgaatctctctgcaaacatcaaccatcatcagcaacggaatgtgcagagcttttgctaaccagtgatggaacggaagtgacctgcatggcttcgtcgacggaggacgtcggcgtcgagaagccctgctgccggctgaacgtctgcacgttgtagagctccaccacgcggtcgtagttctccccccaccaccgctgcgcctcccacttgttaaacatctcccggctgcatatgcatcgccacaatccgttagctcatgctcatcactcgagcaccacgtgctcgacgaaatgtcatgtcgcttgattggcacgaacctgaaacggatgcgcttcagatcgttgccggcgccgccggggatggagacgaaggtgatctgcacgccgggctccacctgcgccgtccactcccgcggcacgcggtcctcctccaggaggactgtctcctcgtcatcgtcgtcgtcgtcgtcgtcgtagtcttcctccccgatgctcggtaccccgctcgcgctcgggctcctgatcacgcgcggctggaagctgcggtggttcaccttgggcggcaagtcccacgtcgacggcgcggcccgggcgccggcgctcgccgtcgtcgtcctcatgtaagtataggcctcgccggccccgtccgacgtgaagcccgactcgtcgatgatgcccgggtacgcggcgaggcggctggagcggtggaagcggctggtcctcaacgacgggctcccgccggacttgtattggtgcctgccgctgccggagaacttgagcaccatgtccttcaactgaaaccacattaaatttgtgcagattaattaattatcctcctgaataagggatcaattgattttccattgtaaaaatatttattaaatatccattagtcaagttaacatcatccttttttttttttgaacgaatgccaagttgacatcatcatacaacagatgatattatatatctgaggtaacatttttgccttgcatattcagtaaatataatttcttgcaattggcaacagagtggctgcatataacttttaacatgccattgcctttccagtatataaaactgcgggagtttcgttcggggcatcaacattcaccactaacgcacacgcctcagcaatcaaatcctacgcgacagctcggtctctcaagtaaagcgccaatcatatccacagcagggttaatgatcaccgatcgattccatctccatcccgatgattagggctaacaaaagcaggacagggcgcacttccgacccccagattagtcgcgtagacgcctagcagaagggctcacacatcaccgaaaagcaccaacaaaaccatcacaatgtcctaaaacccaggacatcttttgcctgaactctcaagcaaggaacaaagcaaagacaaagcacacccacaccacaccactcaagtttctcaaagcaacatcgtggacagcgccccccccccccccccccccccggatcataataacaccagagagggaagggaatcgatccggtccatccacacacacacacacacatagccacacaggtgcatgtcatgtggtgcgtgcttatgctccaaatatgtgtagtactagtactgctactttaaaagacggcaaaggcgaaagcgtgcaggaagcaaaggacgagagtactcgagtcccagtgacgaggcgtgtcatcatggagtagttcagagatgggtcgcagcgagagcccatcttaagaaacaaaccagcccatcgcaaggaccacaagtgtgtgtttctgtgcatggcctacgggctggctacggcccagctttattcttctctgagtgtccaggaccgtcttgggggggggggggggggggtccctcttaagaaaagaaaagggaaaggaacatcttggactgaagagagtagctgcttgtttgataactcgaaggggattgggagtttacacgagggagttgatgatgagattaagatgggaatttgatttttaatcccaatatcttatttggtagaggtgatagaaattgatagggaatttagttggagattaggtcattaataaaaacggatggctgagatttggttaaacaaagtaaaggatgaattccctcctaattacctgcccctacccagttattgaaaaggagtgagttccttcctcaattccccatcctcatcccaccaaaattcccatgtctcccaaccaaacaaaaattttaatagcttcatccctctaaattcccaatccctactaaaaactccctccaaccaaacgggccgtaggagtaagacccaggggttaagatcaatcaaccagatagtgtctttccaggagggaaagatcacattagcagctactaggataggacagtcttttgttgggagcaagcaaagtgaatggatggatggatggatggagcaagtgaaaagggcaggggaatggtagtatgggggaacagaagtgaccatatcaaatcagtccaaaacccaaagcttgaggggatccatgcaagaaaaaagcaagagccttctctcccccaccaaactctagtcatattcccctgggccttgagtccttgaccaactttatcaaggaatgttttaaaatgtagttagagcactgtcattcaccttgtacttgtgattccatgcaggatattgccctgattagacacccggtgaggaagggaaaagaaaagagaaacggtgtatatcaccacaagtgtactagtattggttgtcctcctgtacgtagtggtactctgttccctttcaaaggccaagaacaaggtgacgacaagcaggctaggacaaaagaacaactacagtgtaatactttctcctccgtcccaaatgtaagcatttttgaggctgacacgggtattaagaaagtatatgagaatgattgaaaaatatgtgtgattggttgaaaagagaaaataggtgaaaaagaatggttgtgattggttgagaggaaaagataggtagaaaaatagcttcattttaaaataaagtactgtgctagaaatagctatattttggaacggatgtagtactagaagtactagcaccccactgctaaggagcagcagagggcattcaattgactggttaatgcaacagaagaaaatgtggcatcaggtctccgcccatgcgctagtgcacaacatgtgcgagtactacggatttttacttgtgtacggagtactggagtagtataagaatgcacatcagcacatgtacctgtgaagtcagagacttgccggagttgggcgtggcggtggcggaccggtgcccgccctccccgccgtccttggtcgaacacgcgatgcacgcaagcatttcctagcctctcgagtagtccagaaccgcgcaaatcctccttccctgctcagtcacaaacaaagtccatcgaagagccaagggaggagattgtcactcgttttccgcgcttttcaaactactaaacggtgcgttttttgtaaaaaaattttctatagaaaagttgctttaaaaaatcatattaatccatttttaaagtttaaaatagttaatatttaattaatcatgaactaatgactcacctcgttttgtgtatcttcccaatcttcccaatcctctctctctcaaacacaccctaagataagaatctggtcctggtgtatcaaaagaggaactgagccgtcacgcactcacacggctaaaatccaacatgtactagcaacgtagcagtgccattgatccagtgtgtgcaaggagtaaatacacggaacatttctagtagcagcaggtacatcagattacactgcagccactgccatggctgcagtgccagccggccggccggccggcatcaactccgagctgagtagccatagccagtgagtaaacgccgctctagctaatgcatgccatgccatggcctgcgccgcaggcttttgccttccttaaaatcgatacaccgacagcaacccctcgccagccgagtacgctgccaccatggggcgcacacgcccgcgcgtgtgtatatccatgcccttgggccttggcgcggccggcctgggcccgaacgcatgtttgcacgcgccggctcactgcagaccactgccatgtttgagctctggcttagctaggggtaggcgaggcatcgagcaagaaacggagtcaatgccccccaagctttggctgctttatggagtagtacgtagtatgagaggtacagggaggtagctgcggcaaagtatagcccgggtggtggattgattgattgatgcatgcacggattgatattactgcttaatgctgctgcaccggtgggctcagtgtgcaggcgtgcagctagtacgtcgtcgtaggtagagcattcattcactcaacaagcataggcttaattatgcttgctactgcagcaacaggcaacaggcaaccaaggcatgcatgccgataatacacgagggagcagagaaggttctgagaaaaactgtactagcaggagctcttttatctactcctacgtgaggacactgccactccgaatccaagtgcatcgtccagttccaagcgaaaggttggaagcttggagagcggccgatcgagctgagcaggaggcagatagatagacggatgatgcacatattgcacatttgcatggatagagagaagcccttttaggaccagggccctcatggaaattttatcagtggttgggagtggattggaggacccactgaaggaaatggaaaggcaaacagaagccttcttgcagtgtaacatcccaactaaaaaacagtcctacttgcacctacaaaattcgcgtgtattgtactattgtaatactaccgtttttagtttaagcttgttatactacaaagggtactaggagtaattaccaatggataagattgattatatagttaagtgtggatgacgacaagtgagaatactgcttaccagttagcaagccaccatcaggctattgctcatccaaagcaactcccgccaatcacagtctcgcagcaatgcttgtgaccacgcggacagtggtatctcgtcactgctccttctgacgcaaagatgatctgaacaacagcgacagggaagagaaggtgataaagattacgcaatgtacatgtggccgactagaaaagcataatgctcacttttatctgcaaaaatactgctaggacagatatttagccgattgttcgctgtccaaatcgacaagcctgactctataaagaaacaggccagtactcattgctgcaagaggctgtcgacgctacggaaaaaaaaggcaacagtgggaagcaatgggattgcctccccaaatggacccaatggaaggctggagatctcaatgatcgacaacgcaaacggacccagagatgaacccccctccgaaaacgaaagcgcagcaaatggacactagagcagagcacaggacacacggagctactccaaatatgcacaccataaaaaaagaaacagagaaagagatggcaaagatctcgttctccgattcaaggggaaaggaaacagcagtagtcactggtcagttaccttcttcctcctcttcttggacggcgggtggctcctctctcggtcgacagatcctcgccggcgcgcggcggcacaagagctcggaagcgacagaggagagcggctgagctatcaggcgatcgactgccgccttttgggtggtagctagcgaacgagctgccgagcagcgacgccaacagaaacaggacgaagaggagatcttttccactcccccttttccttttcttttctttttttttccgcgagggagagaagcagggagaaggaaggattgagaggaaacgggcggggagcagaggcaggaacagagcgggagggaggggggagatccccggattcgctcgcggccgtctgatccgcccccgaaatcgagcgaaagcactcgccgaccgagccgtcgacggctatttatacaagggagaaaagcgctcgcgatcacggccgtccgtatgtttcgctaggctgcgacggccaggatgcgtggcgcttggttgggggagtggggtgctttggcccacgtcccaggccttaccacgcgcaccgtaccacacctgctctgcgtacgcatttttaacgtggtgcagccgttggcagttggcttgtggctagcggccggcttcgccaccctcgcggtcgcggtggcatttggcaacccgccaacttgtgttgtcgggctcgggccatgcgcgtgcgcgcgggcgacgccaacgtcgcgcctgggaagaaggtcgcggcagcgtgggtgtcggggacgtgtgtttccgccgagactggcagcgaggacggtggcggttttggtgttggaaggcgacatcccggcaatgtcggctgttccaaaattagtactacaacgcttgtttatggaacttgtcgacaggtgatacccgtagaccggatatagagggtattggggtacgttggtataaggatctacgtaatacgacatcaagtagacaaaagacgaggattatactggttcaggccccttggtaggtaatagccctaatccagttgatgtgggattatatggtggaaaacacaggttataaagggaacaatggaacttgagggatccggcgagatcatggtctagttggttcgactagatcctcggcgatttggctccttgcaggctccgacttcgtaggctgtgagggttatgttggctccgagattcgatgccccaggtcctcctcggggggtcccttttatatcgcaggtcaggcggtttccaagtagaacttagagataatagaccctatacaatacattgacgacccagtcttgtccgagtaggactctttccatctgtagactccgtgaagtatttccttagtgtacgcaggaagtatccgtatgcgcgtgggtataccctaccaatatataacatatatcgaagggtaaagggtatgcctaacccggaaccctgacagtagcccccgacttctgcttaaatgaactcgtgtaaccattcgcgacttcttgtgttgagactgttgtcgctcccggtgtgaggaccatagagtcaggacgtagtcgagaacaccgtgtgaagcccaacggtcacgagtgaatttaaactgaagtccaaaaaactgccgcgcgtaacggacccagaaatctccagcgggcatctctcccctttccttggaattcgcaccgtcggaagtgcgtctatttaagggaattttggggatccattttgaagtccgcctagtgtgaagaaaacatcccgcctgtaagcgctctttgtcttctccgctgccacaagaaaccctagttcatcgacttgagccctctcttcggcgatctccgatcagcgatggatctcggcaaatcatcctccaccagtgcgtcgctgaagaagcttcaggaagacggcgcccttcccggtcgcggaaccatggaaagagaagcaggaggtactaatccccagcccgtcttaggtcgtatggttgcgatcgaagactatattctctgcggttttctccctccgccttccgagtttcttctcttggttttgaacttctacggtctttctcttctccatttgaaccccaattctatcgcctttcttagcatcttttttcatctttgtgaggcctacattggggtagagccctttcttgacctctttcgcttctactacgagttgcgttggatggagtccaacagggtgtctggttgcatcgggttctgacttcgggatggcctgaagtcgcgttatatccccttccagtgcccttcttctcgcagcaaatggaggacgaggtggttctaccttcagatcaaagattcggaccctgtcttcgttgttcccgaggaacaaccggacaagatttcgtcttggaccgcaaagccccctttgaccccctctctccagtcatttatcgacattatcaacgatctctgagtacaaggcttgtcagggtatgaagtcgctgcagacttcattggtaggcggatccagccgctccaggctcgaacccatccagcctttgactattccggaccggaggacgcgacccgggtttctcctcggggtatctttctcgcatttatcctgacatgctcatgttcgcgttcctcttgatttatcgaaatttggttctcgattctcaggtctgaacagcgaagccgtggaacgtcgtgttggccaggtgatgatcagtggtccgacaacggcgagtgccatccccgttcccctttgtgagaaaggggcggccgaacatgatgttgccatcaatgtaagtgtgctcgataggcattctacgttttccttccgagatcacattgtgacttgattacgcataggctcttcctctgactgacatcatcgggctgctcgcggaccatcaggtggtggcgtctttgaaagagaaggtcgccaatgaggcgtctgatgctgctgctgctactactacaagtggtggcaatgttccgacaaaggggaggaagttctcctctgtaagcggacatcgtcgcaaggcatcgacccccttggtaagctatcatgtcgtcagatcgtacagccagaagaatttcgccttacttcgcatcgaccgtttttcaggcctcggacgcgtctcccccgtctccacgacgacaacgccttgtgacggttggtgagaagtaagtagacgaacttaagtttccgtgattttattcgagtgttgtctgaaccatggccgtctcacagggcggcgcgggcgaaggctgcgcaagacgagtccggagggacctccggcgcatcgcccgctgcggcctcgatggatgtcatgctcgcactcgggagccacgaggcgacaccaagcggcccagtcagcgatcccgcggctagccgtggtccaccggctaccgtcctcacctgggagaagctccaggttgagatggggcgcctccttgaggctggtgctcgcggcatcggtcgcgagattgcggaggcgaggtcggcggcgtcgtcggcaaacgagcgggctgatcggctggcacacgagttgtcggaggctcgtgaggacctcaagaagatgagggagttggtggccggcaacgagcgacaatggcaggggctcgagcaccgcatgtcggagctcgggaacaatctgtcagaaatccgtggctcgttgcgggtcgcctatactggtcagcaccagttcgccggggagtgcagtattaagtctactatcccggcgaatcccgacgagttctcgctgacatcttctcttgcggagctggcggcggcgatggaggaaatcccctccaagcatgcggccaggatcggggaggagacatcaaacgggatctacaccggggcgtgccacgtccttgcgtgtgtaaagctggcgcatcctgaactcgatctgcgcgagatcttggatcagggggtggctagcaacacgcataaggaggtgatggaagaagtcggtgatctgggggaatctgttctccccctttttgaagagtagggcctcttgtactcgctagatatgctgtataaaactggatcttaaccgcctttgtgcgagcagttattgttccagcttactcttgtatgttgatcttgaaagcttttttgtcccttgtagagatgttgatgacgaggatatccagcagcgcgggcaacccgagtcaccggcgattattccggccctcacgtttgaaccacatgcgtcgcccgacaatgtagaccagaccattgctacggggacggagatggcgaccacttccttaggttagcggtccattcatcccttttgctcctccgattagatcacctatgttctcagaagaggcgtgtagcctgacttagtcgttcccacactgagcagatctcgagagtgctctcgctggccaagatcgtcgtatccaatattggaagacaaaatttgaagtagcaaaactcgagaggactatgcttgtagtgaagaaagagcaggctgtggaaacgctccgaggtcgtgaggtgtggttcaactcatacttgaagagttgctgcacatccatggacaaggtttgtagagagctccgagtacctcgtggggatcccgaggagtccgtggtcgggtatatctcgtggctgaatggggcctgtgcttaacttgatgacgtcggcaaacgtatcgacgaggccttgaagcaggagtgttgtcgatcaagccgatatgctggggggcacgtgttggcttgcctacgggatcatcgcccgcgcctggacctcgattttctctgtgagggttttgctcgttctcggaggactccggcggagatagaccacctggcgaggttgatggcgccgttggcggagaagatcctccagtctatggattggcgttggccttcttggtagtcttcgtatcctgtgatagatatctcaggaaaaaggtgtaatatagctttggatttgtgtaaaaactgtaagaagtattttgtgaaatagaaaagaaatctatctttaacaaatctttcttacttcggatgtcgtgtgtaagagtgtgttctcagttcgcgactttagtcagtcgtttgagtcgtacactctccctagcccccagccttgtcgtcggaggaattttctcggaggataaggctcttggacctttgacctgccttggttgaataagctctgatcctagcccccagccatgaaattggaaacttaatttccgatttcgcggcttggttaatacgcacggcgagaactcttacatgaccagatcttacatggtctttcgtctctatcgtctctacaggatctgacaaggccttatcggctctgggcgtccccagccgaagatcccttaggttcctcggaggccttgtcgagacggcgtaaagggacatgaggataggtttcaactctaggtgtcatcagggtaagggatcatcgggcggaaacactttgattgtaatatgggcctaagaataggctttattgatactgtaaggtgccttacaggtacggatggtattgactcatacatagaatttatgtagttggtcaatgttccaagaatctgttaactcgcgaccctcgccgtctgcaattttgaatgcgcctggccgcaagacttatgtgatcgtgtatggtccttcccatttgggtgagagcttgtttcgccctgcttggctttgaacccgtcggaggacgtagtcgccgatcgaaagtatgcgtgctcggatgcgcttctcgtggtaacggcggagggcctgttgatagctagttgctcggacggcaactcgttcacgatgttcctcgagtagatttacatcgatgtctcgctgctccacctggtcctcgtcggagtgcttctgtactcgtgtactctgatgtcgtagctcgctggggagcatggcctcggagccgtacacgaggaagaagggtgtttccttattagacgttgtcggtgtggtgcatacggcccatagtactgatgggagttcttcgacccattttttgtcatgtgacatgagcttgtcgtagacacgggttttgatcccttgtagtactatgccattcgccctttcgacttgtccgttgctttgaggatgagagaccgaggcgaagcatatcttgactcctagcccgatgcagtaatcctggaaatcggcgctgatgaactgggagccgttgtcggttatgatgcggtgcggtagtccgtatctacagaatatccccttgatgaatttgatggcgttgtcggcctggatttcccccgtgggtactgcttcgatccacttagtgaatttgtcgatcgccacgaataggaacttgtagccgccctgtcctcgtgggaatggcccgagtatgtctagcccacagcacgagaaaggccaagtaagagggatagtctgaagcgcttgcgcgggtagctttgtgtgtttactgtggaattgacaggcttcacatcgctggaccatgtcgcatgcatctttgagggcggtaggctagaaaaacccttgtcaaaaagcttttccgaccaatgtctgaccggcggcgtgtgacccacaaatgccttcatgtatatcaaggaggaggtgtctgccgtcgtcggacgagacgtatttgagaagtaccccgtttggcgctttcttgtatagatcgttgccgaccatacaatagatttttgctttacgggttattttcttagcctctgtatcgtcctcgggcaactcctcgcttgtgatgaacttgattagtgggatgcgccagtcatctgtggtctcgatatcggcaacggcgtgttctgcctttgtggcctctgagctaatgtcgggggcgttcgggctaactttgccgctaacctcttttactgatggctttatcaggatgtccagaaaagtgccgggctcgagcggttttcgtctggacgcacgtcgtgctaggtcatctggctcgatgttgtctttgcggtagacatgtcggacctcgatcccatcgaaccttttctctagcttcctgacttttgcgagatacttggataactcggggttagaacatttataatctttgtgcacctggtttgcaactagctcggagtcccttttcacgattagtcgcttgaccccaagtgtggctgcagctcttatcccggcgagtagtccctcgtattcggttgtgttattggtcgccctgaagttgaggtggattgcgtgcttgaattgatctccggagggagacgtcaagataaatcctgcccctgctccttggctgttgagtgtgccatcgaacgccattgtccatgttacgttgtcgacttggttgtctgatttgttatcaggcgtagtccaatcggctacgaaatcggcgagtacctgggacttgatggctgttcgtggcacaaagtggacatcaaatttgctcagctcgactacccatttcgcaatgcggccgacaacgtctttgtttctcacaacttcaccgagagaaaaagacgagacaactgtgactctgtgggcttgaaagtagtggcgtagtgtcacgccctgataaattcatcccgaaataaaaatcattttctaaaaggaataatagaattaattaaaattcgaaaagaaattggcaaacactaaaatgcgtacaagaaaaattcgaatgtggcccggagaatttttgttaaattctccttggtctaaaaggagccctcaaattttacttgaattttcagagcaccggaaatgattattaagcaacaaaaacaattatcagagtttattaaaaagaaaaagctaaaaataatcctccttttcctttgggccaagtttggcccaaagtcctccctctctctctctcagcccgcggccaaagtctccctctcctccctctctttccctcctctcccgggcctctcctcctcctcccggcccacctcttccctccccctcccggcccactccctcctcctccttcctcccggcctgcctcggcccagcagcccggcccaagccgcagcgccctcctgccctagtcgcgcgcgcacgtgcgccgcacgcgcgttgagcgcgcctcccgcgtgggtcccgcctgtcaggcgcgcccccaacctccagccgccggcctccttcctctctctcccgtgaaccctagcgccatttcctcctccaaatccgtcctgaatccaaccgttctttccaaattgattggggggaattaatccccattccttcctctttgatttcccccgttttcccccttgaatggctcccccaatcgccgggaacggacgcgccaactccggccaccttccatggccgccggccgtgtttcccgtcgccgttccgccctctcccatgcccggctccctcccctccgctataaaacggaatcccctcgctccgttctatcgttttatccccctcccgcgatctcccgtggtctctagccacctccccgccgtcgtcccctctctcccgtgccgccggccgtcttcagccgcccctgccgccgcgtcagcacgccggccggccgtgccgtcgcctcctccagcgtcgcagccgcctcctcttcgccggcctaccatctgtttcccgcgaagacctccggaagtgcatccccaccggcaacagtggcgttgccgccactgttccgcctccggccgcctctgccgcgtcccttgtgcgccggccgacgtcgccaccacctctcccggcaccggaacgccatcctcttccccggccaagccacggcgtcgcccgtatttcgccggaacgccgtcgcgcgcgccgcctctccctcggtctcgtcggcagcccctttcgccgtgccagtgcgccggccgacgtcgccgtctccacctccggcatcacagcggcaaggtcgccctcggcctcgcctccccttcgaccgaaccgctccgcggtccatcgtcgtcgtctccgttcgttctcctcgtcgacgtcccgtcggtctcccggctcgtcgtctcgctgcgcctccaccgtcatcgtcatcgcagcggcgtgttccacgccgtcctcgtctccgtgcagctgctgctagctgtccctcgtcgcctcctcgccggccccggtcgtcggcgtcgtcgtcctcccgtcgttcccggtcgtcgtggcgttcgtccctccgtcgagccgttctcgtccgtcctcggtgtttcgtcaaggtcgctgcagccccgtcatcgtcttcgtcctcgcctccgcgtcgtcaagcctcgtgccggccgtgtctcgccttcgttcaaggatcgccgccgaagtcgttccctcgccgtccgtctccgccgcgtccgttcgtcgttgtctttcccacgcctcgtcgcgtggtggtaaggatctctcctctcgctgccccgtcctcgtcctttcagtgtcgccccgtacccgttgtgcggttgtcaaccccggtacccgtgtaccggtgtcggtagtcgttcacgtgtgcgggtggtgactgtgtagtgtccgtgttagtgtgcccactcggtagccgcgtggtttccacgtgtgcaggccgtgtggtgtctagtggagtccgtttgtcggccactcgcctcggttgacacacggggtccgcttccgtcgacccgtggaccgtctctatgtactcggtctaccgtggtcctttaggttgacatgtggggtccgcatgtcaacagcgcagccttcctgtcttttccaggctagtgcttccacatgttttatagttgaaaaacctaattataataatccgcaaatctccatataacagcactaaacttcggatgatcatatcttggtcatacgaactctgaatcgacccgttcaagtctcctaatgtttgttataacctaaagaaccgtgtgctttctttttatgtattgttattgcttctttataggcttgtagctttgcttgtgtgcttcgcgtagcttctgtcgttccggaggttctcgaagcgtggtttgcggtcgtcgccgaaggttcggaaggccgttctctttgagcaaggcaagtcacatcatccttgagcatattgaatcccagtttataaaattattttgatttaaattaatgcattaacgctttatttaaattcccgcgttatcactgttttatttagccatgcctatttacctttgttaagacattattattgctattgttattattaccttgttcaccctagaataaacaaaaccccaactagtgggtactctattcatggttccactagtatgaatttaggtagatgcttcgctgattaataggacaacattaggtggtttttataactttagactttgggaatattcatatctcttggatactatggaatggttggcttatggtggaattggacatacccctctcttcctctttcaaagcccctaaaacctgtttttcggtggggtttgggtgcatgccagttgtgggaagtagcaccccggccaatataaggattaagctcgggcctctgttgcaaagcactaccgtacttccacatgtctagtgggtaaggcttagtttgtggctcagtctggttataaacaaaagtacacggatggagatggacgaagtcgggggtcgatggacatctctaggacaaatgaaggctacacgagctgcggctcggtagtcgagatgtcatggcacagggctggtgtcctgctgctaggggctcaatcctgcctgcctgtcccgggggttccggctataggtggggttgggtcggtactcttgtttatggctaggatgggttgggaactatgtcacgtcttccgtccgtataccgtggtggtatgtggcatgtggttacacgtgaggaagatgtgtcttgtgggtaaagatgtacacctctgatcagagtataatctattcgaatagccgcgccctcggttatgggcaagccgagcaatgtacccaagttagtgttttaattcttaaaatttgcttaacaactaaaatgtggaatggttggcctgggttggcttgggacgagctgggacccagggtcgggttgccagttcggtctgaatcatcgtaggccttgggttaaggcaggttcgtgagggttcacggccttgattaataatattgtgtagctctaggatcgtctttataaaatggctttgggcaactaagtgacttttaaatgctgttttctgcaaaacttaacccctatattattaccccttgtacccccttgcattaatcatgcatctgccggtgtggcttgctgagtactgtggttgtactcattcttgctcaatcttcccccccccttcagtaagagaagctttggagaaaaagtcttaggtggaatcctagcttataccccagttgagcgcctgtgaagatggagccgtaggcctgctagtccgctgctgtttatttttgattgtcaggccttaagtgcctttgtaataatgtaaatattatcgatataataaagatgtgccttttgtaccatgtttgtgtggtgtaccccggcttttcctgggacggggattaatacactagcgttcgggaaaatgtatttttctcggtcgcgacacgtagcttccttgatgtcatgatgaccacgtaaagcagcttttggatctgtggatatcttgtctttgcgtcgtggagagcttcgctgacgtaatagactggtcgttgtactttctccctctcgacaacaatgacggtgctaacggaatatggtgtggcggtaatatagaggaataattcttcattaggttggggagcaacaagtacaggggggtttgataggtagcgcttgagtgcaacgaatgcctcttcggcttcctgtgtccatacacatttgtcttgtttcttcagcagagcgaagaaaggttgtcctcgttctcccatcctagcgacgaacctgctcaatgctgccatgcatccggttagcctttgtacttccttgagtcttgtgggcgacttcatgttttcgattgtcttgatcttcttgggatttgcttctattcctctgccagagacgaggaaaccaagcagcttgcccgacggtactccgaacgtgcacttctctggattgagcatgaggcgatatcgtcggaggttgtcgaacgtttcccgcagatcgtcgatcaatgagtcgcctgccttggtcttgacaacgatgtcgtcgacgtatgcctcgacattgttgccgagctggttgctaagtgcgccctggaccgtgcgctggaaggtattccctgcggttatcagtccgaacggcatcttaacatagcaaaataccccgaacggcgtgatgaatgctgtcttctcttcatcctcttttgccatactgatttggtggtagccagagtaagcgtcgagaaaactcaacagctcacagccggctgttgagtccaccagttgatctattcgaggaagagggaagtgatccttggggcatgccttgttgaggtcggtgaagtcgacgcatattctccattttccgttggccttccgcactatgactggattggctagccactctggataaagtatttctctgatgaagccagctttgagaagtttgtcgagctcttctcgtatggcttgttttcggtctggtgcaaatctccgcagtttttgctttactggcttggcatcgggtcgcaccatgagtttgtgctcaatcacctccctggggacccccagcatgtcggatggctgccaagcgaacacgtcagcattgtcgcggaggaaggtgatgagcgcgagctcctatttctcgcttagtgtcgcaccgatcttgacggtcttgttggggttggcactggagagtggaacgatcttgattgcgccgtccggtttcggcgtcttgttcgtcttgctcacttacttgggtggcttagtcgttgcgggtgggctgggtgtttgctcgatcatgtcgaggctccgtttgtcgcactgcaccgccaactttgcgtttccttgaatagtgattgtgcccttcggtcccggcatcttgagcacttgatacgcgtagtgagatgcggccataaacttcgcaagtgcagttctcccgatgatggcgttgtaagctgtatcgaaatcagcgacatcaaaggtgatctcctccgttcggaagttgttggcttggccgaaagtcacaggcaacgtaatcttgcccaatgatctggacgaggattggggagtaattctatgaaaaggttgatcggttggtgtcagcgagttcccatcgcgtccagggtgctgatgaaaagaaggttgattgagctgccaccgtcgatgaggacccgtgcgaccttgatgttccgaatagtgggttcaaccacgatcggatatcgtcctaggatgacggcggtcttggggtggtcttcttccgagattctatcttctgttcagaccacttcatcttgggtgtagccccctgccatgtctaacagacttcgcgttccactttcttgtactctcgtttcgaggagtatgttgtggaacccccgaagatgtgtgaaacgtggaggtcagagtctggatatgctgagtataattcctggggagccgcctccgcgtcctttttaaccacgcgtactcgtttgcctttttcagatgcaatgtgcttctcgagcgattttttgaaaacaaggcaatcttccaaggaaagtttgtccgtcttgtgcatggggcaccatgctttttttgtgtcgctactttgtgggtctgggcgcttgggaggattcacgtattttgctgcgaggacttccgcttgagctttccttttcccatttttgcgatttttcttcttgcttgactcaggtgcgtccgtggccgatttcttctctcccccgatcttcggcttatcgttcttgcgtcttagcgcatcatctgcgtgggcgcatcgctcaacaatctcgaacaatctccgagtggttgtgatgtgtcttgttgctaactcctaggtagtatagcgatctctgacaccggatttgaaggcgcgaattacagaagcgtcggtgattttggagattgtatttctgcactcgttgaagcaccgaacatattccctcaaggattcacccgagttctgtgtcaacgcgtgtaggtcgtctttgatcgcgtggcgcttgtaagttccttggaagttggcgacgagctgttgccacaggtctgcccacgaagagattgagtagggcagaagatgcatcagccacgaacgtgcagagccttttaatgcagttggcaaataattcgccaacgcattgtcgtctgctccggcggcgtagagtactgtggagtagacttgaaggaactcctctgggtcagtgctcccatcgtacttttctattgctccaggtcggaatctctcaggccatcggacatcacgcagggaacgactgaaagccctacacccagcgcggggggcggtgggttgtcggcgatcatgtgtccttcgtggatgtctgtctgatgatgaggaagacgaggatgatgacgatgatgatgggtcgcttggttccggcgtccgattacgaggatatcggcctggatctcgagaatcctgtcgtcgtcccccgctattgtcttggcgccggtctccatcatcgtcgtcgttatggcgacgtcctcgaccagtatcgtctggcacccgccgttcgcgatcgttgtgatcgtggtggttgtggcggttatcacggcctcggtcttcgtttaaacggtcccctcgatcttcgttatcagggcgccgtgaagagacatgacgtcgggaatgattctcgttgtctcgtgtgcgtcgtgcctctcggcggccgttgatgtgatctcggagatcgctagtgccgcgaggtggaagggtagctcgctgaggcgattccctccgttcagggttttcaccattggcatcgccagttggtggctgctctgggtgcgctgcggcagcgacctcttcgaacacgttgctgaggttggtcactgattcccgtagtcgctctgtccaacgcgcgagatcgtcgttcagaatgagattgtagggggtttccctcagtatagagttgacgactctgatgtgctgggctggagtggtcaattgattctccacttctgcattggtgcgtgctgatgtgccgacatcatcgatagccaatacctcccgcggcgcgctcattgtcgatgatccatagtcttcgagaaggtgcaagactgatggttcgtgaggatcgatattgattaccccaacaaatcgatctgaagttggcgtcgctcctcggtccttgtccttattcctgatggggatgtgtgactattggaccttaggggatggcgctttcatggcgctgagaaagaccttgcagtctgagaggtcgtgattctttgtcttgtgaataggacaatagacatcacgagttggagaaatacgctgaattccacgctctttgcaggcgcgaatttcagcgcggacgttgaggaaaacccagcaggcttgcaaagtgtgtttcctggttttgtggataggacaccaggaccttgttgcttcggaagtcatcttcctcggctcgcggttcatgtcggaacgacaaggtttggccgcatcagaacccttctcgagctgggatgtcgtcgatgctccgttctccgcctcggcgggaggatctttcgacatggagtcgccttggtttgtagccactgcattcttgtttccggtcattggcggaccggttgagatcggcatcgtggtgcaaaccgggaagacgatttcgccgacttgagtccataccagcatcgttgaagcagggaatacttggctgaggttggcgttgacgctgttatcgactaggctggatgacatagtagtagaaccttgagtaccaagtccccctacctggcgcgccactgtcgacgggtgatacccgtagaccggatatagagggtattggggtacattggtacaaggatctacgtaatacgacatgaagtagacaaaagacgaggattatactggttcaggccccttggtaggtaatagccctaatctagttgatgtgggattatatggtggaaaacacaggttacaaagggaacaatggaactttagggatccgacgagatcgtggtcgagttggttcgactagatccttggcgatttggctccttgcaggctccgatttcgtaggctgtgagggttgtgttggctccgagattcgatgccccaggttctcctcggggggtcccttttatatcgcaggtcaggcggtttccaagtagaactcggagataacagaccctatacaatacattgacaacccagtcttgtccgagtaggactctttccatccgtagactccgtgaaggattttcttagtgtacacaggaagtatccgtatgcgcgtaggtataccctaccaatatgtaacatatatcgaaaggtaaagggtatgcctaacccggaaccctgacagaactcgagttacttctgtactccctccgtcccacaatataagggattttgagtttttgattgtaatgtttgatcactcgtcttatttaattttttttttgcaaatataaaaaacgaaaagttgtgcttaaagtactgtagataataaagtaagtcacaaataaaataaataataattttaaaaaaatttgaataagacgagtggtcaaacattacaagtaaaaactcaaaatatcttatattatgggacggatggagtattttcttttggttttttccgagtgaatttgtgggactgtggagtactgtactgagcacttgtatttttgttggttttaaattagtcttttgcccttcggtccgattgaccaaagctgacttgacccagcggtcgtctcctcttcgacctctctctcattctagagtcattgcatagtgacgaaactgcgattcccctgattctttttcattaacagttcaagcacactagtaaaaagccgttcctttggcaatacggcacactcgaatgagtttgatcttgcggtgtttcttcggagttgaaaaaaaaaggtactcctacctcgctaacgttaggcccgagcacgaaagctaaagataaaagcggcgcattggtggtgcttgaattatagtttcttgatataagatgctcctacaaagaaaagaggttgccatggggtctgtgcaatgggccaaaacacaagcaacacatgagcagcatttgtaactgctgctgagttatgcaggcacggtgtgacaaatcagctttgcatgcttattagtcttggtcattagcaaaagtttgatttgatgcttacttaccaggctaccagctagtagattgatatatctagtgatggcgctggcgcaccacggttggcatgcatgacgtagtcatgataccactctccgtttccctctccacatgttcccctttggcggtaatcaccattgtaaaggcaatcattaggaggcaaccccgctgtctttgcttggtgaccgaggtgattaaaaggaagcaaaggcgccacagcgaagaaataatctattccaaacaatacacttgtagtagtagcagcagtagcagtactgttggatcaagccatgcaggtatatcgagcaagtggcaccattgttctgtgtggcaaccgcctggcagcgaacccccaactgctaggtttctgatcccgagacgaatcacatcctcatctctctctctctctctctcgaattttctggcgcgcgaattttaatgcaggggccagagggggcgcaacggcacacagtaacacagtaagagcaagtttaatagtatagctaactactagctttaattcatctatagccaatctaatagctcatctatacaatagttacatactacactattaatatctggtcccacctgtcatacacactgcgtcttggagtccgtgatatagttggctataaatctatagcccgctgctcttctctctctttatttatctttttaaaatatgtttatagctggcttatagcatactattgtacatgctctaatcacgtcgttttaaacccgtgtgcctctgttgttgccacacgcatccccacggagcgcggtcaaagtggcacatcgaacgcgtcagtgtgttgtacggcgcgtgcagccttaaaccgcttggtctcttggctggctgcttttggttgccttgatcgagcagtgcttgcagtagtacagcaagttcacttgtacactacggagtacgcttgggttgctcgagcagcaacgcaccgctgggctggagccggcgaaagtgaccgggcgaaccacaggctcttgcagcggacagatcgatgtgttcctgagaaagcagcagcaaatctttcacgaaaggaggagaaaggcaaagcgcggccggctaggtcggcacagtttaaagccgcgcgcgccacctaaagccatccccagttggcatgggatggcacggcagcgtgtctggagtgggaatatggttcagccgaagaatttgttttcagtttttggtatttaggttatccaaaactgaagatcaaatcatgctatgaaactattaatatttttttggggccagcggcagatgcctcaagtagattttatgtcaagatagaagaagttcagtacatagaactaacaatcattatctgttatgattcaaacgcgtcccaatcgataccaacccattagagtgaattactacatctctctaaaagttatttttagtgaacatcaagtgacatcttagatagcggactagccaacctagccgcagaccatgcccaccattctccatgaattccccgggctattttccacagccgaaaagttgccaatactaattaatttggttttgtagcttggcttggtattttggttgtcatgtaaatgtttgatagctttaggcagggcgaggagggcgtagacattgggggtacggcgggtggcagcttggctcggcctgtggcaggcgacaccgtgggtgattcatgtgggtgtgggtggtcagtgggatatatgggaggactagtcgactatgaatttaggtttattgtatagggtctattgggctaaaggcttgtttagattattgccaaaatcaaccataccaatatttgggggaaaatatgtagtgcaaaccacatatgtagtggaaacttggaaactactgttggatcgagaaatagatgtccgagattcatccacgtcaccataagttaaaatttaactcctagtaaaattttaattcatgagtgaatctgcgagttaaattttaactcatggtgacgtggacgaatctcggacgtccatttctcgattcaacggtagtttccaagtttccactatatatgtggtttgcaccgtatattttcccaatatttggcaatgccaaattttaatgtatttggacctaccaaaattcataggagttagatgtattttgtttgaagccttaccaaaactcggttgtatttttagtagtggaagtaatattgatagggtaatattagctaaagtatgatagggcttgcagtagcaacattgtaaacatgccataaatttcggtcaattcagttaatctggttaactgaggtttttttttcaatgcggagaggtatataatcaagttgatcgacctaatttggttagccgaggatacaactgaatttatgaccaagttcttcatcttggtctcagtgtttcggtttggtcaatcagttggctagtggcactggcttgcacatagcttttgtccacccaatgtgtgagcaagccagtgccgctagtgaatcgcgcatagatttccagtgaaaatgtccctccggccaagttctcgccaatgttgtgtgaggagagtatttctaatttatctcgagcgagttgagcttgagactagggttttcaatttcggtaaccatcgaaattttgagaatatcatgaattttggtgtttttccatgaaattatttgaaaatttaacatagtttggctgaattcaaacaaattttgataaactgaaaagtatttgaaaaaaatctgaaacttttggacgtgacatgtgcttgctggtggggtaaaactttttaaaaatttcgaaccgaaatttcaagggaaaattgtaaccatgccattataattttgcaaaatttgagatatgacatcctgacccacatgtcattgactcatgtgggttctacatgtctttaagataccgatggtatatctcaaactttgcaaaattataatcgcatgattccaaattacccaaatttgaaaccctgctcgagatcagtaaggcagtaaagcaccactggcaatggggccgtgctgtccgacggaaagcctagcccatctcaagcccatgaaagcataacaaagccccaaatgatttgacaaacgacaatctcgtcgacaaacgataagaagtcgagccgaaagcaatacaactctgcttcagcctcgtctttaccataccagtttcctatacacaattaactctgcaaccgcgacaggttgactgcctctgtagctgtcctcggctgtctttgggtgaccagaagtctagtttgctttcgcgtgtcaaatcggcatttctgagggattagcacgcggccatgcattgcctttgatcggtcgcctagaatgcaggtgcacatacgcgcacatggacgaggatccactaatgtctaatgatccagcaacgggcagaggcatttggtgttttttgctttatctctcgctccgaatcagagccttcgcacgcgtccatgcatcaaaagaaaagactgcgacgcctactcttagcactgcacaagtgtggaccttagtcggtcgccaacgtaccaggctgccagctagtcactgttacaaggttttgatcacgcacaaagtaatggaaacggtattcaaatgtagacacggactttgtcatctcgccaaacaacattccctgtgcatttttattgttgttgctgctgctaaaggattgaccacattcaaaaataaataaacagccagattctgacaaatgataaccgttaacactggtcaggagtatagtatgtggcgacgtggcgtgcgctctcaggtcattcacagtgcatctagatggcattcagctccaacctcccacatccaagattccataccacacatgcatctcccgtgaccaaatgaaaaatgggaagctaaaatgggtcactcgttcctcgtcagtttttgttaggaggggagaagaaatcttcgctcggaggggagagacagcgaccgagttgggaggggcatgccgggatcgtcgtcgccgacctccgccgctgtcgctcagaccctcgccaaccatcgctgtcggcatattcgttggggagagggagggggagaggtgccgctgccatcgacctgtagctgcctcccgtcttctcccaccagatccatgccggtgagttccatgccgccaagctttgtgccgttccgctccacgccggccggaggttgggggagacgcggtggtcggaggagaagggggagactcgatccgcagtcggatccgttgctgcccgggccacccagcgccgtcgcttatcggggaggtgtggtggccggaggaggaagggggaggtgcggcggcagccagaggaagggggaggctcagcggttggaggaggaagggggtggcgtggcagtcggaggagggggaggcgtggcagcggagatgaggaggggaggcgcgcagagcgagtagtgagggggaggcgcggcactgagaggagagggagagagaaagttttttttgtgtggaccccactcaaggctacatagcactgtgaaatttgtggcaaatattattcttaggtgttcttggggctacgtggcagatgaggttcggcaaaatgtgttgccgcattgctaatgccctcaccatttttgagcttgaatgatgggagcttgaataaagtagacacacctgggagtatgtcacgtctgctagtgttttcaggagaagtacatctaccctaaaaaaaacgagaagtactcctacatctacacggctgacgtggtacaaagtggtgccgatctgacagtaatattgtaacgaggccgaaacagaaaacacctgctataaaagggacttctatgtgacttctggcctggtgtattggctttactgggctgtaatgccgtttgctgggtttctaattcatacaagtacttaagtccaagagggcatggtctgtatatgggctgagcaattcctttccaaaggaataagttcactatagatgtctcaatttgtcacctagcgtgaggctagcatgaaattcgttcgtaaaccaaaatacaagatataacgagttcctcaatttacaaaactgtagcatccgaggtcctagataatattatgcctagttttaactgacatggtatgctaagccagcgtgggatccacgtgggcagcgtgggatccacgtgggccacacatgtcagtgcctagcactttctttctcctcctctcccctccttggagcaagaacatgcccaacccaagacccagaactcatctcctgcctatgcccatgcccactattctcattggatataaaaaaaaaacatacccgttgagtatcggatacccatagattttaaaccacataatgtaatatattaatttatatatatggataatcggaaaaagatcctctgacttaattgtttttttagagaatctgacttaattgttgtacagttgagccactgacatgtgaaccataataaagtgggacccatatgtcagtgactcaactgtatgtgtagttaagtcagaggatctgcttccatttacaatcacatttagatatgtatgtttagccaataagtataaaaccacaaacaatcaataccacaagtcataatcattcacatagtattaaatgcgggtaaaaatccgtaaattccacaattacaaattatttcatcacatagaaagaaagcagttgattaagccattaatagtattggtcatgtcttgatatataagaagtacatcatttgacacaaactcctacaaataacaaaaattaataacatatactatcatgtcatcacaaataatttcacgtattccctcactttggcctccttattttctagctagcaaacaataaatatccattaaacatagtgtatattagtatattatgcattaaacattttttaccgtgctcctaacccaccgcatgatacatctaataaacttgaaaattgtaccaggaatctatctatctatctatctattatattattaaaacaaccttgaaaggtggcaccacgttcgctgtgggggctagaaattcccacattaatcggagaaaaagaaaagaagagtccaaatagaaatacaatcttaaaaaaagctgaaattcggaattaaaagtaagaaatattgaaagaggagtccgtataggaacctaatacgagattaatcaaattcggaagaaaaataaaataaaatccgaaattagcaaaaaaaaaaggagaagagttcgagtaggaatacaattttaaaataactgaaattcggaattaaaaataagaaatattgaaagaagagtacatacaggaatccaatacgagattaattaaaattcaggataaaaaataaaaaaatcaaaattagaaaaaggaaaagaaaagaagagttcaagtaggaatacaatttaaaattaattaaaactaggaattaaatataagcaatattgaaataagagtaaatataagaaccaatagtagattaattaaattcggaataaaaaataaaataaaatctgaaattagaaaaagaaaagtaaaatttcaactaggaatataatctataaataactaaaattgttgataaaaataaagactattgaaagaaaataccatctaaaacacatgacgagattaattaagtaacagatctatataggagcagagtggtggaggttcataggacatctaaaaactattaataaaacgccaaacaaaatactaatgacgattaaaacgaaggacgacgggcaggtcgtgaatcatcggtcaaggcggttggcggggcttctagaaagtaaaaaaataaaacccaatgataatcatatttgatttttaaaatctcaattacaataaaaataagaggcagctggcgggtcgtataggagtacaatggcatagccaccgatggttgtgggtcttctagaaagtaaaaaatgaattccaacgatagttatgtttgagttttacaatcccaatggcaataaggagtatgcggcggatgggtcgtagaggagtatattggcagcgtttgataggatttctattatgaaaaaaaatgaaacccaacgggacaatatactctaaaaactataaggtccaatttttaaaggttcgggcgtctaaaaataaaaaataaaccccaatgataatcatgtttgattttaaaatctcaatgacaataaagaagggcggcagcggacgaaccgcagaggagtacagtgacaaagtcgatgatgttttggcggaacttctataatataaaaaaatgatcctaaacaaaaactatgatatatttttaaataataatgacaataaaaagaagatgcaatggacggtcgtagaggagtataataacagcgtttgtcgagacttctagaaattataaaaaagaagaccaacaggacaataaagtctaaaaagtttttagatccaatttttaaaggttattaggagaatgaatagaaacagtggtagattgagctatataataacgaataatatgatagaagtaaagggtgctgatgtgattttcaaaaactatgaaatttgaaacacaaagataataaggtttggcctttcaaaatcttaagacatcgagataactatttaataatttttaagtaaaatcatattaaaacatatataattttatatgggtgctagccgcgcaattgcgcgggccacccagctagttctgagaacaacgatgaaaaacaacttaccatactatcacctaaatcgatggactcattacttttaatcattagaactatatgtagaaaacttaaaaaataaaaaaccacttactacccctgcccactcgcatgctcatgaggtgcacattgccctgctcctcccctctctagctcatgctctcccctccttccttaggcagagttctttccccaacttttccaacatacttccctcgttttccacgtgcatgcttttcaaactgctaaacagtgcgtttttttgcaaaaacaaatttctatacgaaagttgctttaaaaatcatattaatccattttcaaaaaaagtaaatacttaattaatcatgagaaaatacatcgctctattttgtatgcgcggcaggtgagttcccaacctcacctcccgaacacaaccttaatttagatactaaattaatagagaacaatttccaagctacatatctcattctgtcagggttatggataccacatacccagtagtaaccgactaagcttggcaggacccaccatataccaagtcttatacggaatcatacctcatatatagaaggagtttcggataaggaaggacaagaagagttctatatgaaaactataagggctactcggattgtatccatattggtttccttagttctacttagacaaggggatatctatgtgtataaatataagaccccctaggaggagggggcagaccaacaagacacatcaacatcagagataagcctagatagaccctatccagtgcttgcggaggccaacaacagggatctagcgccatctctaatcttgacgagttcatattcgaggaggaagactaccctgtcgtcaactatgtgttggtgatccatgccgccaagttgacgacagctagataggttatcccaattattatacttgtgtgattctaatgaatatagagcaacaccggcttcggccaacaggagtagggttgttaccttcctatgaaggggtccgaacctgtttaaaatccttgtatccatcctttttatctcaatctcgcatatatcctggtaccaatgatctccataccttgcaaataccgtagtcgatacctaaaacgtcgacacatccctaatctatcgataaaataatgtgaaattttgacagcgtatattgagtcatatatcattctacaaacatacacatctaaattaactagcatggcggcccgcgcagattgcgcggctagcatcattatattttctctcatataatagcatatctgttttctcattatattattaaaatatattacaatgacaacatagttttaaattttgcaataaccttacgaaactactaatgtgtaatattcatattgtattttatatacgtgttagttattaattttttttaatatcaaattttagttatttgtaaattatatatattcctatatggactctagacttgtcttttaatattttttaattctgattttttattatttttaattgtatttttatgtggactctaaacttatctttcaatattctttaatctttaatttcaaatttcagttacttctaaattgtatttctatattgactttaaactcttcttcccatgtttttcttaatttcgaattttagttactttttctctgattaatgtgagaatttctaggtcatgagagcgaacgtagatgcacctttttattccgaattttagttagttttaaattcctatacggcttatggactctatactctacttctaatattccttatttttagattccgaatttctattttttttcttaattgtatttctatatggattctatactctacttctaatattccttatttttaattccgaatttctattatttcctaattttatttctatatggaccgtatactctatttctaatattccttatttttaattccgaatttcaattatttcctaattgtatttctatatggactctagtctcctcttctaatattccttatttttttaatttcgaatttcaacaatttctgaattgtatttctatatggactctagtctcctctaatattctttattttttaattccaaatttcagctatttctaaattgtatttctatatggactctgccttttctttttctctaattaatgtgagaatttctaggtcatgagagcgaacatggaggttcctttttttttccgaattttagttagttttaaattcctatatagactctatactctacttctaatattccttattttttaatttcgaatttctatttttttcttaattgtatttctatatggactctatactctacttctagtattccttatttttaattccgaatttctattatttcctaattgtatttctatctagactctttactctacttataatattccttatttttaattccgaatttcagttatttcctaattttatttctatatggactctggtctcttcttctaatattccttatttttaattccgaatttcagctatttctaaattgtgtttctatatggactctgtattttctttttctccgattaatgtgagaatttctaggccatgatagcgaacgtggaggctcttttttctattcctttaattatataatagattctacaatatcccaacaaaaattacaaattcaaatatgaaataatattttatcgaaggacaacatccctaccctttcatatgatgtgaatcaacataaaagtatgaaacaattcaataacgcatgttaccgcatcatacatagtttttcaaacatttacagctaattagatatagaattaattcaagcatgattagtccaagtcacgacatagaaaatttggtgcctttagttcaaggaaagatccaatcactctatgaattttttgaaatttgctcgagtaatcaagcaagcctaatagtccttatgtcccaaaataagaccaatacagaacatgaaaagactaaaatacccttactacatcaaatcctaatgcaattatgcctctatttttatctatccccaacatatttatcctctagttcaccaacttcgatgtaatgattactaaaattaaacttatttggaaacaaaccggatggcccaaaataaagttattatagaacagagggagtaatcttttacgtaagtcctctaaaatatgttctatgttccaatctttttttttgagaattacacagtacaacacagatactcacaacgcaaacacactcacctctatgaacgcacgcacgcacgcaaaccctacccatatgagcatcttcgaagactaggccggtaaatccttgagattgacgaagtcatcataggcgcttcgctgtcgacgagtacgtctcctactactaaaagcacaactccgttaaatcctggaaaattcgctcgcttctaaataattatctaaacaatgttgttgagcattatttaaaaaaaatcatactttttaataatggcataaataattcggttgattttctacccttataaacgcaggtaaaatacatgcccgagtatttatacgggttacctttatagttaattttaaaaagtaactatcattacagacacatgattatatattataggatttttacataaaactgtgtatttccttaagaaaacgtacaatctaaaatccgtttattccggaagtggcctaaacatatcaggtgcccacctggaagccaccgacgtgacataagtataggaggcagcggcacttcccgtcttccctttaccttgcaccttaagtaccagccagatcgaactccaatgcttgatccatgatatggtaaaggcaagcacaccaccactaacacatgacatgatacggattagcttgcaagctacccatcgcgcacgttgcccagacacgacggattcgttctatccaccacactccaaaaccccagacacggaccgagaactcaaaggccaacccaatccaaaccaaccgcggtgcccccactccacccccgcacactgaacacggtacagctgttgccgcaacacgcacggacgctcggtcatgctcaccatcaaattttgccggaagatgcgaaaccaccgagccgacgccgagccctttccgcttaaaagcggcctcgtccttccgccccgaaacaatccgcggtcacatgcaccgcccaactccccaccccacatgccccgcgcccgcgcccgcccgcgcatcgccacggacgcgcaaagcggccgcatgcgcaagcctcacctcgccggcaggtacgccgcgaatgcgcttcgaatcctttagccccattttgattcaaaggaaatttacaggaattttaaaggatttcattcttataggatttttctatatatccctttgaatcaaaggaataaatcccatataatcctatgaaattcttatagaatgcctctttctatgtaagaatcctttgtgtttttcatgcggctcaatcaaacggtcattcctatgtttttcctgtgttttgtatttccctgttttacacttatatttctgtcaaaatcctatgtttttcttattactttggttttttttcattcctactattcaaaaggcacccttagtgtgcatcatggccacgtcgccgtcgtcggttagtagtactacgtaccatcaacactactactatctcgcaatgataaaaagggagggcgggtgtgcgagggggtggagcccatgtcatgcaggggccgtggggagctggggcaacgaacattacttgtcacgggctccagttgacaaaaggcaaacggatcctgctgcccgatcgtgtttttggcgaaaaggagccatgggggccatctcgtccgttttgcgcgctgctcgctcgtcggctcgttcaagagatgaaacctgtctatctatctatcggccatcgcaagcaaagcctctccacttgcaaaaggaactggttagtaggacactgtcatcatcgggaaaatgaccttaaaaagcatgagcctcacgttgctgcactgatgttgacggcactgttgagtcgacaaacaggagagcatagcaagcagaggctgatcagcatttgggaagtaataagatgttactagcagtaaacatcaaggaaaacgttgacatctcccttcgtccaaaggagaccacggagtttgatcgatttcacacgcaaatctgacaggggaacactggtaaattacagaagcatagaatgttttgctactatcgtacggtgggcgcgagcaggcagaaaatcgcagagcaagacagcaacaaggccagtatgagttcactgggcagcaggatcatcatccacgcagcattcagtcacctgcacacagaccagatgacgttttcagtaagaaatcttcagacattgcaggatacagacataaacacgcacgaagtaattggggggagatcaagtagtcgtaccattagttgatcgagaactggccgccgagaagtcagaggatgccattggtatggagatcgacagttgggtgcctgagaatgacgaaagattagcattctcatcagcgaggtctgaccatgaatcccttccctttggccactcatcaaagaagggacgcagcgtctggttctcttgcttcacagaatcgacagccgcatagtcgttcccaaagaacgaaagtggctgcctctgaacctttgaaagtgagctgggggtgttctgaccaaggtcacttagtgcccccagctgagaatagcttgaaaggggaaatggcgagttctgagatggcagcagccgccatggattttcaatagatgtgttgatagcttcagtaatgagttgactctgctcatccgccaaagatcttgtgccataagcagtatacctgaatttgagaagatacagtgattgggaattagtaggaaacacgaatgcaagtgctaggcatgtacctatcgaaaatatgtcaattctaactttttagaacagaattaggaagaaaatattcataagggctcaattgtaagaatgaaataaatccatgtaccggaggaaatgtagttaacctaagtccgacagataaactagaaagaatccaaagcattattatcatacaaaaaaaataaaattaccttttccaaaagttagtattcttgtcatgaattcatataagaaaacatagaaccatggtttaactaatcatatatagcagcagatcatggcccaagaaacattctattttgcagtaaaaccagaagacagtttagttgcagcagcaagtcagctgaaccctaaacagttgatgacaagagcagaaagaaaaaaacaatcaaagactaaggtgaccgaataattcaataactaaactaaaccaaatcaacacgaacaagcactgtagagttatacatttggtgaagtaaataatgaggctaggtactaaggtcagactgagattcaccgaagataaatcaaagagttcctttttttttgtagggaagataaatcaaagagttgcattgttaaaatctaatcatcaacattggatgagtatagagttgacttggagcatcatgcagctcacgctggccactggaaaatgtttcaggtatagtggtgatcggtgagacatcttcagagacagtattttgcaagggccaaataattgactgcccctgaagagcagagacagaaacaactggattctgtggaggaataaagaagtggagtaaatgccaagggaagccatgatcagctaccagcaggcacaagcactgcgagggcagacacaaatatgtagtagtatcatctttatggacagtacatgtttcaaactactgggccaaagccatgttaagaccctgcaccccagtttcacctgagcagaaatctcttatggagactgtccccggcttctggggctgaaaactgataccagaaagtatgggaagggcaaagaggcagcactctggaaacctaaacataacacaaatttttgcagtgcagagagtaaagtttcagactttcagtgattgcagcaccaaatcgaagtagtactactgagcatggacagctgattcgattgccaccaatgcaaacaaatgggacacagttattaaccgatcacaatgaaaaatacagattcataactgcatccacctgacaccaatcagttagagcatggcaccttttttttagacaacggaaggatacatatcatgattcaagacagtgctaaacaagtaaatatggcgtttgattaaaaaaaaagaaatgaacaatcacctgagatctttgcctgttccaccaccaacagctgcataaggggcagcattatccatgtgcagctgagaacccaacgccgagccaaatgagctgggcatgttcctccccccgcccccgccattgctgccggcaatagcagggtaaagagagtggttttggaagctgctgccattggaggcagcagcaaggggcgccgccgcagaaccgacaacagatgagggcggttgggactgggcgaccagctgcgtttccacaggctttcttgaacggttgcggccgcggtgcatgtggcgctcgcagtacttggaatccggcgcggcctccttcgagcaccgccatttcttgccgtccgtacgccggcaccgccctggctctgggtccagcttcttgccgaagtacggaccatatccaactgtacaaaaacaggcacatcgtagcaaccgtgttacacacaagaatgcatttgttggtaatgcattttgagttcctaatagaatggcatttgaatatttgagaagtccatatccgatccatatgcagggcatagttatctgttcttagcaatcgctcaaaaatggcgagcaaaaaaacagtttgccagggtgttggttcacagagaaaatggcttatcccatgggcatactgataaacaaaagattttatttcagacaagagcgtgtgcacgtcctctatcagatcaaacagagacagaatgatgggcaaacttccccccccccccccccaaaaaaaaaaaatgatgcgctaatcgtgaagcgagcacgagttttggatttaaaaacaagcctttttattaccaaatccggaggatagcataaaaacacacacgcatgtttcttgaatcgcgtaacccggattaacaaatgacccggagccaattaacaaatggaagcaaagtacgcctgatcggaataaacaaagaagccgacactaaacaagcatccaaaagcaatgcagcgatggtagaggagaggcaagaaataggaacacgacgtacgggcgggatggttgtagaagcgggcggcgagggagtcgagtccgcggcggatggggagcacgagatccggcgggacgggcacgcctgccaccaggtacttgtatatgagcgcctgctgctccagctcctcgtactgcgccgcggtgaacggcggcagcctcgccgccgccgccggcggccacctcgcggtcatcggcgcgtcctcccccatcgcgacgccaccaccgcccctgcacccacccacccacacacaacgtctcaccgtgttgtcacatgcaccactggagccaagaaaatgggttgtagccgcgggttcgcgttgcttacgcggagagcggggtggagcggcagaaggggaggagggaggcggtcgcggctgccggggacgagcggtggtcggccaccgccggagacagggaggcatacggcatcgccatcccttccctctctctctctcaatctctctctcgctctcgctcgctcgcaacgcaagcacacgccgcggtctttagtaatggtgctttgcttcgctcgctcgcgcgcgcgcctttattgcgcggcttgtctctctctctctctctctctctctctctcccgctgcgcctgcgagctctcgaccaggggcgaggagtcgcggacgtcgagcccgacacgagaaggcgcgctccgacccgagctagacgacaaacacctgcctccccccgggcctgtcgacctagcggacgtagcggcgtggtacgagcagtagcatttccattttctcctctctctctctctctctctctctcgttatctcgtggcgtagtacgtacagcaccgatttttcttcgagtacagtgcgaggctgcgtttgtgtttg

SEQ ID NO: 63 - DNA, 369 bp, Oryza sativa
atggccagaatcccgaggttcctcttcgccaccatcccggacggcctaccgaagtccgacgccgacgccaccatgactacctgcctcccctacttcaggaagctgctcgccgacctcaacaaccgtgccgccggcgatgacgacgacgacgccgtgccaccggtcacctgtgtcgtggccgaccacctcttgggcttcagcctcgacgccaccgtcgccgtgctcgcctcgcgctgccgcccactgcccacccttgcatgccgccttccaccgccccgcccccgcctcgcctcacgcctccgcccaccacccgcccgccgccgccgctcgcgctaccgcccatgcgcgccgcgtgagagagaggaatag

SEQ ID NO: 64 - DNA, 876 bp, Oryza sativa
atggtctccgccaaccagccgccgcccgacgcggccgcggcagcggcgggctcggctggggaggacgccagcaagaaggtgcggaagccgtacaccatcaccaagtcgcgcgagagctggacggagcaggagcacgacaagttccttgaggccctccagctctttgatcgtgattggaaaaagatagaagcttttgttggatcgaagactgttattcagattaggagccatgcacagaagtattttttgaaggttcaaaagaatggaacaagtgagcatgtcccacctccacgaccaaagcgtaaagctgctcatccataccctcaaaaggcctccaaaaatgagccaggatataccataaaggcagattcatcttccatgcttaggaactcaggcatgaatgccactgtttcgtcatggacacacaattctatcccaccaattgtagcctcatccatggtgaaagaagatttaggtgctggagcaatggcccccaacaatttttgctctagcagtactgaaggccctgcgagggcatggcaacctggtgaaactaatgatcagataaatcaagttccgtcactccgccttatgccagattttgcacaagtatacagcttcttgggcagcgttttcgatccaagcacaagtggccatttacagaaactaaaggagatgaatccaattgatgttgagacggcattgttgttaatgagaaatctctccatcaatttgactagtcctgattttgaagatcagaagaagttgctatcttcatacagtaccccgtctgatgggcttgagctaggaagcaccagaagctcagttctagctgatagaccattaagtgctccattcatgattaagggcgaatag

SEQ ID NO: 65 - DNA, 1551 bp, Oryza sativa
atgaaggccgccgccgccaccggcggcggcggcaaggagaccctcgcggccaccctcctccgctacctcatcatcttgattgttccgttcaccgtcctctacatcctgtacaccctccacgccattctctcctccacgccgtcctgcccacttgatcgccccatcgtcacctcctccgtttctctgtcccaactctccaccacccgcaaccacacgccgtcgtcgtcctccttgtctacgccgccacccgccccggtgtcgatggcggcgacgactctgcagcacgtggtgttcggcatcgcggcgtccgctcggctgtgggagaagcggaaggattatatcaagatctggtggcgccctaacgccggaatgcgcgggttcgtgtggatggatcagccggtgcgggagtccggcgtgccagacgggctgccaccaatcaagatctcgtcgaacacctccggcttcccttacaagaaccgccgcggccaccgctccgccatccgcatctcccgcattgtctccgagacgttccgcctcggcctctccggcgtgcgctggtacgtcatgggcgacgacgacaccgtcttcctgccagacaacctcgtcgcggtcctccagaagctggatcaccggcagccgtactacattggctacccttccgagagccacctgcagaacatcttcttctcgtacgggatggcgttcggcggcggcgggttcgccatcagccagccgctggcggcgaggctggagcggatgcaggacgcctgcatccaccggtacccgtcgctgtacgggagcgacgaccggatccacgcgtgcatggcggagctgggcgtgccgctcacgaggcacccggggttccaccagtacgacgtgtacggcgacctcctcggcctcctcgccgcccacccggtggcgccgctcgtgtcgctgcaccacctcgacgtggtgcggccgctcttccccaacgcgcggtcgcggccggcggctttgcggaggctgttcgaagggccggtggcgctggactcggcgggggccgtgcagcagtcgatatgctacgacgcgcgcaaccggtggacggtgtccgtgtcgtgggggttcgtggtgatggcgtcgaggggcatgatctcggcgcgggagatggagctgccggcgcggacatttttgaactggtacaagcgcgcggactacaaggcgcacgccttcaacacgaggcccctggcgcgccgcccctgcgagaaaccgtcgttctactacctctcgtcggcgcgccgcacggtggcgcgcgacggggagaccaccgtgacgacgtaccagcggtggcgccaccgcaatgacatgcgcccgccgtgccggtggaagatcgccgacccggacgcgctgctcgacaccgtggtcgtgctcaagaaacctgaccccggcttatgggaccggtctccaatgcgaaattgctgcagggtgctgtcgtctcccaaaggacaggaaggaaacaagacgatgaccatagacgtgggtgtatgcaaggattgggaattcagccaagtataa

SEQ ID NO: 66 - DNA, 1536 bp, Oryza sativa
atgaaggccgccgccgccaccggcggcggcggcaaggagaccctcgcggccaccctcctccgctacctcatcatcttgattgttccgttcaccgtcctctacatcctgtacaccctccacgccattctctcctccacgccgtcctgcccacttgatcgccccatcgtcacctcctccgtttctctgtcccaactctccaccacccgcaaccacacgccgtcgtcgtcctccttgtctacgccgccacccgccccggtgtcgatggcggcgacgactctgcagcacgtggtgttcggcatcgcggcgtccgctcggctgtgggagaagcggaaggattatatcaagatctggtggcgccctaacgccggaatgcgcgggttcgtgtggatggatcagccggtgcgggagtccggcgtgccagacgggctgccaccaatcaagatctcgtcgaacacctccggcttcccttacaagaaccgccgcggccaccgctccgccatccgcatctcccgcattgtctccgagacgttccgcctcggcctctccggcgtgcgctggtacgtcatgggcgacgacgacaccgtcttcctgccagacaacctcgtcgcggtcctccagaagctggatcaccggcagccgtactacattggctacccttccgagagccacctgcagaacatcttcttctcgtacgggatggcgttcggcggcggcgggttcgccatcagccagccgctggcggcgaggctggagcggatgcaggacgcctgcatccaccggtacccgtcgctgtacgggagcgacgaccggatccacgcgtgcatggcggagctgggcgtgccgctcacgaggcacccggggttccaccagtacgacgtgtacggcgacctcctcggcctcctcgccgcccacccggtggcgccgctcgtgtcgctgcaccacctcgacgtggtgcggccgctcttccccaacgcgcggtcgcggccggcggctttgcggaggctgttcgaagggccggtggcgctggactcggcgggggccgtgcagcagtcgatatgctacgacgcgcgcaaccggtggacggtgtccgtgtcgtgggggttcgtggtgatggcgtcgaggggcatgatctcggcgcgggagatggagctgccggcgcggacatttttgaactggtacaagcgcgcggactacaaggcgcacgccttcaacacgaggcccctggcgcgccgcccctgcgagaaaccgtcgttctactacctctcgtcggcgcgccgcacggtggcgcgcgacggggagaccaccgtgacgacgtaccagcggtggcgccaccgcaatgacatgcgcccgccgtgccggtggaagatcgccgacccggacgcgctgctcgacaccgtggtcgtgctcaagaaacctgaccccggcttatgggaccggggtgctgtcgtctcccaaaggacaggaaggaaacaagacgatgaccatagacgtgggtgtatgcaaggattgggaattcagccaagtataatccattag

SEQ ID NO: 67 - DNA, 639 bp, Oryza sativa
atgggcttcccggtgggctactcggagctgctcctcccgaggctgctgctccaggtgctcctcctcctcggccacctccatcgctttctcctctgggccttccacgcagtcggcctcggcgacctcatcgacaacccgcccggcctggcggccacggagcaggacctgatgctgcaggggcgcggcggcgggatggcggagggttgggcgtcgtcgtcggcgctccagcaccgccggcccgagttcagggcgattccgccgatggccatcgaggaggccctccccgtggtgcggttcgacgagctggtggcgtccgccccggcggcggtgtgcggtggcggcgactgcgcggtctgcctcagcggcatctgcgggcgcgacgaggtgcggcggctgtccaactgccgccacgttttccaccgcggctgcctcgaccgctggatggcccacgagcagcgcacctgcccgctctgccgcgcgccgctcatccccgacgagctcttgcccgccgcctccggcctgcctgacccctccgactacgacctctcgtactacccatccccgctgccgctggcgcccaccccgacgctgctgcgaccacacgagctgctgctcaacggcttgggcggtttccagtga

SEQ ID NO: 68 - DNA, 1089 bp, Oryza sativa
atgctgctgctgggctgcctgtggaggcggcttaaggcgagggggcggcgagcggaggcggtggcgagcggcgatggcggcgagggcggcaggtttaccaaggccgcgtccggtggcggcggcggcggcggcgggaggttcttggtcagtgacatatccgagtggctggacaagtacaaggtgttcaaggtggaggagttggagagtggcacgggtggtttcgacgacgagcacctcatccagggaagcgtgtacaaggcctacatcgacggtgaggtgttcgccgtgaagaagatgaagtgggacgcctgcgaagagctcaaaatcctgcaaaaggtgaaccacagcaacctagtgaagctggagggcttctgcatcaactcggaaaccggcgactgctacctggtgtacgagtacgtggagaacggctcgctggacctgtggctcatggaccgcgaccgcgcgcggcggctggactggcgcgcgcgcctccacatcgccctcgacctcgcccacggcttgcagtacatccacgagcacacctggccgcgcgtggtgcacaaggacatcaagagcagcaacgtcctgctcgacgaccgcatgcgcgccaagatcgccaacttcggcctcgccaagaccggccacaacgccgtcaccacgcacatcgtcggcacgcaggggtacatcgcgccggagtacctcgccgacggcctcgtcaccaccaagatggacgtgttcgcctacggcgtcgtcctgctcgagctcgtgtcggggcgcgaggccgtcagcgacgacagcggcgagccgctgtgggccgacgcggacgagaggctgttccgcggccgggaggagaggctggaggcgcgggtcgcggcgtggatggaccccgcgctcgccgagcagacgtgcccgccgggcagcgtcgccagcgtggtgagcgtggcgaaggcttgcctgcaccgtgacccggcgaagcgccccagcatggtggacgtggcgtacacgctgtcgaaggcagacgagagcttcggcgactactcgggcgagagcgtgtccgtcgccagcagcggcgggatcgcagcgcggtga

SEQ ID NO: 69 - DNA, 753 bp, Oryza sativa
atggggaggggaagagttgagctgaagcgcatcgagaacaagatcaacaggcaggtcaccttctccaagcgccgcaacggcctcctcaagaaggcctacgagctgtccgttctctgcgacgccgaggtcgcgctcatcatcttctccagccgcggcaagctctacgagttcggcagcgccggcataacaaagactttagaaaggtaccaacattgttgctacaatgctcaagattccaacaatgcactttctgaaacccagagttggtaccatgaaatgtcaaagttgaaagcaaaatttgaagctttgcagcgcactcaaaggcacttgcttggggaggatcttggaccactcagcgtcaaagaattgcagcagctggagaaacagcttgaatgtgcactatcacaggcgagacagagaaagacgcaactgatgatggaacaagtggaggaacttcgcagaaaggagcgtcagctgggtgaaattaataggcaactcaagcacaagctcgaggttgaaggttccaccagcaactacagagccatgcagcaagcctcctgggctcagggcgccgtggtggagaatggcgccgcatacgtgcagccgccgccacactccgcggccatggactctgaacccaccttgcaaattgggtatcctcatcaatttgtgcctgctgaagcaaacactattcagaggagcactgcccctgcaggtgcagagaacaacttcatgctgggatgggttctttga

SEQ ID NO: 70 - DNA, 1068 bp, Oryza sativa
atggagcagcccaagccgccgtcggtagccgcctcggcggcggaggcgcagaacccgaacgccttcacctgcgagctgccgcactccatctacgcgctggccttctccccctccgcgcccgtcctcgccgccggcagcttcctcgaggacctccacaaccgcgtctccctcctctccttcgaccccgtccaccccaccgccgcctccttccgcgccctccccgcgctctccttcgaccacccctacccgcccaccaagctccagttccacccgcgcgccgcctccgcgccccacctcctcgcctcctcctccgacgcgctgcggctctggcttgccccgctcgacgatctcgccgccaccgccaccgccgccgcgcccgagctccgctccgtcctcgacaaccgcaagacatccgcctccgagttctgcgcccccctcacctccttcgactggaacgaggccgagccccgccgcatcgggaccgcctccatcgacaccacctgcaccatctgggacatcgagcgcggcgtcgtcgagacgcagctcatcgcgcacgacaaggccgtgcacgacatcgcctggggggagaacggcatcttcgcctccgtctcagccgacggctccgtccgcgtcttcgacctccgggacaaggagcattccaccatcttctacgagagcccccgcccggacacgccgctcctcaggctggcatggaaccgctatgacttccactacatggccaccctgctcatggacagcagcgccgtcgtcgtgctcgacatgcgcgcgcccggggtgccggtggccgaactacacagacaccgggcgtgcgccaacgcggtcgcttgggcgccacaggccacgaggcacctttgctcggctggggacgacggccaagcgctgatttgggagctgccagcgacgcccggcgcagtgccggccgaggggattgatcctgtgatggtgtatgatgccggtgcagagataaaccaactgcaatgggcggcagcttacccggagtggatatcgattgcctttgagaacaaggtccagcttctcagggtctga

SEQ ID NO: 71 - DNA, 1068 bp, Oryza sativa; identical to SEQ ID NO: 70

SEQ ID NO: 72 - DNA, 570 bp, Oryza sativa
atggcgagaatgctccttgaggcggccgcctccggctcggtggaggactcactcaactcggacctcgtcgtcatcctcgccgggctgctctgcgcgctcatctgcgtcctcggcctcggcctcgtcgcccggtgcgcgtgcacgcgccgctgggcgcgggccgccggcggcgggacagcggctggcggcggcggcggtggcgccgccgcggcgaacaagggcgtcaagaaggaggtgctgcggtcgctcccgaccgtgacgtacgtctccgacggcggcggcggcgaggcggaggagtgcgccatctgcctcgtggagttcgaggacgggcaggccgtgcgcgtgctgccgcagtgcgaccaccgcttccacgccgcctgcatcgacacgtggctgcgcgcgcactcgtcgtgcccgtcgtgccgccgcgtgctcgtcgccgccgagatgccccccggcgagcggtgcggccgctgcggcgcgcgctccggcggccgcggcatcggcgcgctgctcttgaattactggaaggcgccggcctgcgacgccgaggggccagagttggcgtag

SEQ ID NO: 73 - DNA, 504 bp, Oryza sativa
atgctgcagcgttctacgcgccagagggctccaggtcatggaaggacgtcttcattgtgcaggatcgatgcgaccgatatgggctgtaagttgccatcgaattcactcgcctatcatcccgctcgagctgtacttcttatcttggcatgcctactgtcacggtgtcccctgatattcagacgtggcacacattctgtagtacactgcaacaatgtcactctgaagtactcctatatgaactctgaatactgtaagttacgcctcattgatctttccaggggtgtcaggattatcagagaaggaagcgattactacctgatttaccagggtgagatccagaggtacttggggtcgagacagcatgtgagctgcgatagcaaggacgctcctgcgcagagtagcgaggacgagcagcggcagatatccgatcggatcttgttcttccttggagacctggaggctgcatgcgcagatgccaaacgtgtgaaggtgcgacgaccgtga

SEQ ID NO: 74 - DNA, 465 bp, Oryza sativa
atggatggtctgcctgcggagctgtgcatcaagatcttccacctcctggatcaccaatctctcgcctctgctccccaagtgtgcaggaagtggaacacgttgacctccgacgacgagctgtggcgcaggctgttcaaggacaggtggggagcggatgctgcagcgttctacgcgccagagggctccaggtcatggaaggacgtcttcattgtgcaggatcgatgcgaccgatatgggctgggtgtcaggattatcagagaaggaagcgattactacctgatttaccagggtgagatccagaggtacttggggtcgagacagcatgtgagctgcgatagcaaggacgctcctgcgcagagtagcgaggacgagcagcggcagatatccgatcggatcttgttcttccttggagacctggaggctgcatgcgcagatgccaaacgtgtgaaggtgcgacgaccgtga

SEQ ID NO: 75 - DNA, 1443 bp, Oryza sativa
atggccttgaagcttctctggctgcatgccgacggacactgccagtgccacctctctctgctgctgcgcctcgtcgcttgcctcgcccttgtgctgctgctgccgccgccgccgcctgcccaagcggcgacggtggtcacccacctgccgggattcgatggtcctctacccttctacctggagaccgggtacgtgggcgtggaggaggagaccgggacggagctcttctactacttcgtggagtcggagcggagccctcgcagcgacgtcgtgctgctgtggctgtcgggagggccgcggtgctcggtcttcagcggcttcgtgtacgaaataggccctgtaatgtttgtcgcggaacgttacagcggcggcacggttccgcggttggagtataatccgtattcctggacgaagttggcaagcattctcttcgtggactcgcccgttggttccggtttttcatatgcgcacgatcccaaaggttatgatgttggagacatatcatcttctatgcaaattgtgaaatttctacgaaagtggctggatgatcatccaaagtacctttccaatccgttctatattggaggggattcatacgccggaaaggtggttcctcttatcacgcagtatctctctgaaggaattgaagaaatgcgtcatccaatcattaatttaaagggttatctagtcggcaatcctagtgcaggagataagattgatgtgaactctagggttccatactctcattcatttggagtgatatctgaccaattgtatgaggctgccctggcaaattgtaaaggggattatgaaaacccaacgaacaaaccatgcactgacgtaatgcagaccattaacaatctcatgtcagaagtattggaaccagcatgtccctttgactggccatggccaatgccaggaagagatgcttccaataggaagtctctaaccgaggagcactattggttaggtgacccacctgttgaacctcctttcagttgttttgctgcataccgatactacctgtcttacttctgggcaaacgacaatgccaccagagctgctctcgggataaaggagggaacggtgacggaatggataaggtgccctacgggtcttccttacacacgtgatcttccaagcagcatagaatgccatttcaacgtcaccaccaggggttaccgtgctcttgtgtacagcggagaccacgaccctattgtgccattctcaggcacgcaggcatggataagatcattaaacttttccattgttgatgattggagagcatggcaccttgatggccaggctgcaggattcacaatcaagtatgctaacaacctgacctttgcgacaataaagggtggttgccatattcctcccgaaaatcggcccaaggaatccttcattatggcaaaacggtggctggctggtggacccctctaa

SEQ ID NO: 76 - DNA, 1347 bp, Oryza sativa
atggccttgaagcttctctggctgcatgccgacggacactgccagtgccacctctctctgctgctgcgcctcgtcgcttgcctcgcccttgtgctgctgctgccgccgccgccgcctgcccaagcggcgacggtggtcacccacctgccgggattcgatggtcctctacccttctacctggagaccgggtacgtgggcgtggaggaggagaccgggacggagctcttctactacttcgtggagtcggagcggagccctcgcagcgacgtcgtgctgctgtggctgtcgggagggccgcggtgctcggtcttcagcggcttcgtgtacgaaataggccctgtaatgtttgtcgcggaacgttacagcggcggcacggttccgcggttggagtataatccgtattcctggacgaagttggcaagcattctcttcgtggactcgcccgttggttccggtttttcatatgcgcacgatcccaaaggttatgatgttggagacatatcatcttctatgcaaattgtgaaatttctacgaaagtggctggatgatcatccaaagtacctttccaatccgttctatattggaggggattcatacgccggaaaggtggttcctcttatcacgcagtatctctctgaaggaattgaagaaatgcgtcatccaatcattaatttaaagggttatctagtcggcaatcctagtgcaggagataagattgatgtgaactctagggttccatactctcattcatttggagtgatatctgaccaattgtatgaggctgccctggcaaattgtaaaggggattatgaaaacccaacgaacaaaccatgcactgacgtaatgcagaccattaacaatctcatgtcagaagtattggaaccagcatgtccctttgactggccatggccaatgccaggaagagatgcttccaataggaagtctctaaccgaggagcactattggttaggtgacccacctgttgaacctcctttcagttgttttgctgcataccgatactacctgtcttacttctgggcaaacgacaatgccaccagagctgctctcgggataaaggagggaacggtgacggaatggataaggtgccctacgggtcttccttacacacgtgatcttccaagcagcatagaatgccatttcaacgtcaccaccaggggttaccgtgctcttgtgtacagcggagaccacgaccctattgtgccattctcaggcacgcaggcatggataagatcattaaacttttccattgttgatgattggagagcatggcaccttgatggccaggctgcagggttaaattcacaatcaagtatgctaacaacctga

SEQ ID NO: 77 - DNA, 1209 bp, Oryza sativa
atggccttgaagcttctctggctgcatgccgacggacactgccagtgccacctctctctgctgctgcgcctcgtcgcttgcctcgcccttgtgctgctgctgccgccgccgccgcctgcccaagcggcgacggtggtcacccacctgccgggattcgatggtcctctacccttctacctggagaccgggtacgtgggcgtggaggaggagaccgggacggagctcttctactacttcgtggagtcggagcggagccctcgcagcgacgtcgtgctgctgtggctgtcgggagggccgcggtgctcggtcttcagcggcttcgtgtacgaaataggccctgtaatgtttgtcgcggaacgttacagcggcggcacggttccgcggttggagtataatccgtattcctggacgaagttggcaagcattctcttcgtggactcgcccgttggttccggtttttcatatgcgcacgatcccaaaggttatgatgttggagacatatcatcttctatgcaaattgtgaaatttctacgaaagtggctggatgatcatccaaagtacctttccaatccgttctatattggaggggattcatacgccggaaaggtggttcctcttatcacgcagtatctctctgaaggaattgaagaaatgcgtcatccaatcattaatttaaagggttatctagtcggcaatcctagtgcaggagataagattgatgtgaactctagggttccatactctcattcatttggagtgatatctgaccaattgtatgaggctgccctggcaaattgtaaaggggattatgaaaacccaacgaacaaaccatgcactgacgtaatgcagaccattaacaatctcatgtcagaagtattggaaccagcatgtccctttgactggccatggccaatgccaggaagagatgcttccaataggaagtctctaaccgaggagcactattggttaggtgacccacctgttgaacctcctttcagttgttttgctgcataccgatactacctgtcttacttctgggcaaacgacaatgccaccagagctgctctcgggataaaggagggaacggtgacggaatggataaggtgccctacgggtcttccttacacacgtgatcttccaagcagcatagaatgccatttcaacgtcaccaccaggggttaccgtgctcttgtgtacaggttcaattag

SEQ ID NO: 78 - DNA, 1209 bp, Oryza sativa; identical to SEQ ID NO: 77

SEQ ID NO: 79 - DNA, 1155 bp, Oryza sativa
atggccttgaagcttctctggctgcatgccgacggacactgccagtgccacctctctctgctgctgcgcctcgtcgcttgcctcgcccttgtgctgctgctgccgccgccgccgcctgcccaagcggcgacggtggtcacccacctgccgggattcgatggtcctctacccttctacctggagaccgggtacgtgggcgtggaggaggagaccgggacggagctcttctactacttcgtggagtcggagcggagccctcgcagcgacgtcgtgctgctgtggctgtcgggagggccgcggtgctcggtcttcagcggcttcgtgtacgaaataggccctgtaatgtttgtcgcggaacgttacagcggcggcacggttccgcggttggagtataatccgtattcctggacgaagttggcaagcattctcttcgtggactcgcccgttggttccggtttttcatatgcgcacgatcccaaaggttatgatgttggagacatatcatcttctatgcaaattgtgaaatttctacgaaagtggctggatgatcatccaaagtacctttccaatccgttctatattggaggggattcatacgccggaaaggtggttcctcttatcacgcagtatctctctgaaggaattgaagaaatgcgtcatccaatcattaatttaaagggttatctagtcggcaatcctagtgcaggagataagattgatgtgaactctagggttccatactctcattcatttggagtgatatctgaccaattgtatgaggctgccctggcaaattgtaaaggggattatgaaaacccaacgaacaaaccatgcactgacgtaatgcagaccattaacaatctcatgtcagaagtattggaaccagcatgtccctttgactggccatggccaatgccaggaagagatgcttccaataggaagtctctaaccgaggagcactattggttaggtgacccacctgttgaacctcctttcagttgttttgctgcataccgatactacctgtcttacttctgggcaaacgacaatgccaccagagctgctctcgggataaaggagcggagaccacgaccctattgtgccattctcaggcacgcaggcatggataagatcattaaacttttccattgttga

SEQ ID NO: 80 - DNA, 1101 bp, Oryza sativa
atggccttgaagcttctctggctgcatgccgacggacactgccagtgccacctctctctgctgctgcgcctcgtcgcttgcctcgcccttgtgctgctgctgccgccgccgccgcctgcccaagcggcgacggtggtcacccacctgccgggattcgatggtcctctacccttctacctggagaccgggtacgtgggcgtggaggaggagaccgggacggagctcttctactacttcgtggagtcggagcggagccctcgcagcgacgtcgtgctgctgtggctgtcgggagggccgcggtgctcggtcttcagcggcttcgtgtacgaaataggccctgtaatgtttgtcgcggaacgttacagcggcggcacggttccgcggttggagtataatccgtattcctggacgaagttggcaagcattctcttcgtggactcgcccgttggttccggtttttcatatgcgcacgatcccaaaggttatgatgttggagacatatcatcttctatgcaaattgtgaaatttctacgaaagtggctggatgatcatccaaagtacctttccaatccgttctatattggaggggattcatacgccggaaaggtggttcctcttatcacgcagtatctctctgaaggaattgaagaaatgcgtcatccaatcattaatttaaagggttatctagtcggcaatcctagtgcaggagataagattgatgtgaactctagggttccatactctcattcatttggagtgatatctgaccaattgtatgaggctgccctggcaaattgtaaaggggattatgaaaacccaacgaacaaaccatgcactgacgtaatgcagaccattaacaatctcatgtcagaagtattggaaccagcatgtccctttgactggccatggccaatgccaggaagagatgcttccaataggaagtctctaaccgaggagcactattggttaggtgacccacctgttgaacctcctttcagttgttttgctgcataccgatactacctgtcttacttctgggcaaacgacaatgccaccagagctgctctcgggataaaggagattcacaatcaagtatgctaa

SEQ ID NO: 81 - DNA, 1557 bp, Oryza sativa
atggcggccgccgccgccacctccccggcgcgggcggcggcctggaccttcgccgccgccacatgcgtcaagctcctgctcgtccccacctaccgctccaccgacttcgacgtgcaccgctactggctcgccctcacccacgccctccccgcgcggcggtggtacaccgacgcctcgtcgcagtggacgctcgactacccgcccttcttcgcctacttctcccgcctcctcgccctcccggcgcccctcgtcgacgcctccctcgtctccctccccgtccccgacgcgccgccctccttcgcctacctcctctacctccgcctcaccgtcgccttctccgacctcctcctcctcctctcctccgtcctcctgctggccacggacgcgctcacgcggcggcggcggcggccgttcctctccctcgcgctcgtcctctggtcgccggcgctgctcgccgtggaccacgtacacttccagtacaacgggttcctgatggggctgctgctgctgtcgctgcacttccttgagcaggggagggatctcgccggcggagtcgtttttgctgctctgctgtgctcgaagcacctgttcctagtggcggcgccggtctacttcgtgtatcttttccggcattattgctgtggccggggtgtggtgaggggattgggaaggttggtgctgatgggggctggtgtggctgctgtgtttgctgctgcatttgtgcccttcctgtactatgggcagatgcaacagctctttaaccggttgtttccctttggtcgaggcctgtgccatgcttattgggcgccaaatttttgggtattctacattttacttgacaagatcttcgcgtttcttcttagaagactaggcttcaacatccagatacctgaagcttcatttaccggggggcttgttggtaattcgtctccttttgctgttcttcccaaggtcactccaataactacatttttattggtcatacttgctatgtctccttgcctcatgaaagcattctctaaaccccagccaaggcacattattagatgggtgtcatatgcaactacatgtgggtttatgtttggatggcatgtacatgagaaggcatcactccatttcactattccgcttgccctaattgccatggatagcttggaggacgcgaagcattattttgtgttgtcaatagtttcatgttattcattgttcccattgttgtttgagaaccaagaatatcctataaaggttatgcttctgttgacctatgctaccctcatgtgggtaggattttcttcccattttgctgcaaaatctcctcaagaagggaagaaagtaaatgaatcaggcagcgtggtcaggaaaaatagcttcattgggtggatcagttttagctatcttttaggaattgttgctatagaattatggtctcaagtattccaccactatgtatttggcagcagatttcctttcctacctctcataatggtgtcactctactgtggtgtcggaatgatgtactcatggatgtggcaactcgcatggattgtcaggcactaa

SEQ ID NO: 82 - DNA, 1122 bp, Oryza sativa
atggcctccctgccgccgcccgcgccgccggccatcggcggcgacccgctcgccgccaccattccgccctcattgccgtcgccggcgccgtcgtcgtcttcgctcaacctctccccgtcgcttctcatcatcaccgcgctcctcgccttcgtcttcttcgcctccgtgtcgatccacttcctcctccgctgcctcgcgcggccgtcgcacccggctccgagcccgctgcccagggcgtcggcggcggcccaacgcgcgacgacggcgtccgccgtcgaggctggggaggctaccgccgcgtcggcggtggggaggagccatgagggggaggcggcggcggggggtggggaggaggtcgacgacgagaaggagcggctgatcgcgtcgctgccgctgttcaccatggcgtcggcgctggcggcgctgcccaagagctcccccgactgcgccgtctgcctctcgccgttcgcgcccgaggccgagctgcggctgctcccggcgtgccgccacgcgttccacgcctcctgcgtcgacgcctggctccgcaccaccccgtcctgcccgctctgccgcgccaccgtctcgctcccgcacccgccactccccaccgccgccgccgccgccgcctccaacgcggcgcaacaggatcccctcgactcgcggagcagcaacaactcgaggagcttccgcgtcgagatcggcagcatcagcaaccgccgctcctccgccgcggccgacgaccggcgcacctactcgctcggctccttcgactaccgcgtggacgaggaggtggaggccgtcgtgtcccgcatcgcgcgccccgcggcggccaagtcaacgaccggttccgtgacgccggcccccggcgaggcgctggcggaggcggcggggtcgcggggatggctgcgcgagtacgtggaccgcctcgcctcctccgcctcgtccctctccggccggtggagcgggcggtggagcgcgcggtggagccagagccaccacagcaaccggcaggaggactcgtggcggtgggacccggaggcggcggtgatgtcggcgccgcgcggggtggacgacgacgagccgggcttcgtcacgctgtaccgttggatcgtaggcgtatag

SEQ ID NO: 83 - DNA, 1362 bp, Oryza sativa
atggcgatccggaacttctggtcgatggccgcggcggccgtcgggttccggctcgttctcgtgctcttcggcggggacctccacctcgcctcccgccccgaggtctccacccccctcacctccatccgccgcctggcggaagggtactggctgaagcaggcttccatgtcgccctactccggttcaatgtatcatggttcccctttgcttctattggttcttggtccattgactaacaaaaggtctgttggacatcatgatcatatatattgcagtttgatttttgtggccgtagattttatagctgccatgcttatccgagcaactggtcgtagactccaaatagcacgcaacagaaacttgaagtcacttgagctcacagaggcagtgagtaattcagttaacgtaagtgcaggagatattgcttccctcatatatttgtggaacccctgggcaatagttacttgtgtgggttcatgtacttcacctatcgagaatttaatggttgtgataatgatatatggagcctgttcacgtcttgctcctcttgctgcctttggatatgttatggctacacatctctctctttatcctgcaattctcattgtaccgatcattcttttattgggatatggtccagatgctcctccaacaaaagtatttcgtataaaaagctcaagtgccagtaaaactgacgtatcagacaatgataaaagttctagctcaagagatgttcaacaattcttgtggaaaccagttttccacttcatattgtggatgcttttctggacattttatgtgttgctattgagcagcatagttctaaataaagtgggtggtcttcaggagatgtttgaaaagacatatggttttatccttaccgttaaggacctatcgccaaatattggtgtattatggtacttctttgctgaagtctttgactttttcagaagcttcttccttatagtcttcaatatgaacattgtttttatggtattaccattggcaatccgtctgaagcatcgtccatgcttccttgccttcatttacacagcaattgtcgcaatattgaaatcgtatccatcggtcggagattcagctctttatcttggtcttttgggcctatttgctaatgaattagcagagatgcaattcactttcttcttgttttttggatatatcggagtctctctccttagccctgtcatgcacaacctgtggatctggagggggactggcaatgcaaatttctactttgccactggtttggcttacacttgccttcagaccgtgttggttgtagagagtgtaagttcaatgataaagcatgacaggaagctaagattacttgttacagcttga

SEQ ID NO: 84 - DNA, 1263 bp, Oryza sativa
atggcgatccggaacttctggtcgatggccgcggcggccgtcgggttccggctcgttctcgtgctcttcggcggggacctccacctcgcctcccgccccgaggtctccacccccctcacctccatccgccgcctggcggaagggtactggctgaagcaggcttccatgtcgccctactccggttcaatgtatcatggttcccctttgcttctattggttcttggtccattgactaacaaaaggtctgttggacatcatgatcatatatattgcagtttgatttttgtggccgtagattttatagctgccatgcttatccgagcaactggtcgtagactccaaatagcacgcaacagaaacttgaagtcacttgagctcacagaggcagtgagtaattcagttaacgtaagtgcaggagatattgcttccctcatatatttgtggaacccctgggcaatagttacttgtgtgggttcatgtacttcacctatcgagaatttaatggttgtgataatgatatatggagcctgttcacgtcttgctcctcttgctgcctttggatatgttatggctacacatctctctctttatcctgcaattctcattgtaccgatcattcttttattgggatatggtccagatgctcctccaacaaaagtatttcgtataaaaagctcaagtgccagtaaaactgacgtatcagacaatgataaaagttctagctcaagagatgttcaacaattcttgtggaaaccagttttccacttcatattgtggatgcttttctggacattttatgtgttgctattgagcagcatagttctaaataaagtgggtggtcttcaggagatgtttgaaaagacatatggttttatccttaccgttaaggacctatcgccaaatattggtgtattatggtacttctttgctgaagtctttgactttttcagaagcttcttccttatagtcttcaatatgaacattgtttttatggtattaccattggcaatccgtctgaagcatcgtccatgcttccttgccttcatttacacagcaattgtcgcaatattgaaatcgtatccatcggtcggagattcagctctttatcttggtcttttgggcctatttgctaatgaattagcagagatgcaattcactttcttcttgttttttggatatatcggagtctctctccttagccctgtcatgcacaacctgtggatctggagggtatctccctctcccatccttcccctctcttag

SEQ ID NO: 85 - DNA, 564 bp, Oryza sativa
atgaggcgtctgctcgtcccggtgctcctcctcatgctcggattgtctacctgcgagtcctccgtgttgcaggacacatgcaagtccgtcgccgccggccacaagtacgtcacctacaacgactgcatcaaggccttccaggccgacagcgccagcgccaccgcggccgacgcgcgcggcctcgccgccatcgcggccaggatcgcggagaaggccgccaacgccacgtccgcgcgcatcgccgcgctgagagccgcggagaaggacgcgaggaggaaggaccgcctcggcgtgtgcgcggaggtgtactcggacgccgtggaccagctcggggagaccgccgaggacatcgccaggggcggggacgaggccacccaggacgcggtgacgcagctcagcgcggcgctggacgcgccagggacgtgcgaggacgcgttcggcgaggccgacgacgcgtcgccgctggccccggaggacgccgagttcgcgaagctggcgaccatcgccctcgccgtcgctgcgtccctctcgccgccgccatcgacaccggcaaccatggattga

SEQ ID NO: 86 - DNA, 1170 bp, Oryza sativa
atggcggcaatggcctcttctccccctacaacaccaaatctcggttcgcagcctacatgggtgccctatgagccaaccagggattgctcccagggcctctgcagcatgtactgcccgcagtggtgctacttcatcttcccgccaccgccgccggccttcgacatcaccggctccagctccgacgactcctccggcccaaccttctcgccgctcgtcatcgccatcatcggggtgctcgcgagcgccttcctcctcgtcagctactacaccatcatatccaagtactgcggcaccttcagctccctccggaacagactccttggctccagcgctcaccgcggcagcggcggcggcgccgacggcggagacaattccaggagccaggagccgtggagcgtcgcgctgtcggacgggatggacgagacgctgatcaacaagatcacagtgtgcaagtacaggcgcggcgacggcttcgtggacagcacggactgctccgtctgcctcggcgagttccgcgaaggcgagagcctccggctgctgcccaagtgcagccacgccttccacgtcccgtgcatcgacacctggctcaagtcccactccaactgcccgctctgccgctgcaacatcgcgttcgtcaccgtcgggatggtctcgccggagccggaggcccgcgttccacgggaggataggagagacaaccacgagctggtcctgacaattgacaacccggagcatgtgcgcgaggagccacagaacgtggtgaccggtgtcgccgtcggcaacggcggccgcaaccacgaggcgaaggatggtccggggaggtcggaagatgcaaatggcacagctgagatcagagaagacggcgccttgatgccgcccacaagggcgccgtcgtcgttgtcagacacgcaccgtgaaggccggatgtccattgccgatgtcctgcaggcgagcctggaagacgagctgatggtggccagggagagcggcctcctggcaggctcttcggggtcctcaagacggtgtcacggggagcacagcaaggacggcggcggccgcagtggccgggcattgccggacggcgcgaatatgaagagattggcgccggccgggagatcatgcttcagcagcaggagtggcagaggaaaggactccgttcttccaatgtga

SEQ ID NO: 87 - DNA, 2019 bp, Oryza sativa
atggcggaccagaacggcgccgcggccgtgagcgaagcggaggccgcccctgttcaggttgaaactggtgctgaaagtggggatgctgaaagtgagcagtaccaaccatttttctccatgtgccagccgattcgctctgttagctattcaaattcctgggatatgagcaacttggattcgatggatgataaatacatgctgagtgcaccttggcctgaaaatgagcagccccagtctgagaatgacatggatttgttagatggggatacaaatatgcagtctgaacccctcagcacagagcagcctagctccaatgcatgtgacccagttatatgtttaatggtgcacacaataagccttgaactgaaatatcttatccaactattctacataaactgtgataaccaggatgaaatagatatctgggatgggaaaactaagcaagactcatcatcccttcttgacagcaagctgtgcaactccggcagcggcgctgaaccttgcaacatggagggccaacaattttctttgtccttttcccgcaacactcaatctcaattggtgatgataaagatggtttctgttcattctgtgctcttaaagaacatattgatgaatcaatccgaagattacccagaattatcatcagattttagaccaggacaacaggaggatgcacatgagttcctacgttgtttgctggacaacctggataagtgcaccactgatcccaagccaaaggataagccctcatcttttgatgaagaaagtattgttaagcaggtttttggaggccgactaaaaagcaagttgacttgctgtgagtgtggacactgctcggagacatatgagcccttcttggatcttagcctggagattgatcaggctgataaccttattgatgccttggaatcttttaccaagttggagcgaattggggatgctgaggacaagctgaactgtgaacattgtaatgcaaaagtttgtaagaacaagcaacttatgcttgatagatcaccagatgtcgttgccattcatttaaagcgtttcaccagccttgatagatctgttgaaaagattgacaaacatgtggtgtacccactagaacttgatttgaagccattccattgtgatcctgacatcaataaggagctgaaatatgatctttatggcgttgttgagcattctggttcacctagctatggccattatgtttgttctgttcgttcttcaccgagcacttggcatctaatgaatgactcccatgttgatttgattagtgaggcaagcgcgctgaaccaggaagggtatattctgttttatattaggcagggcaaatttcagtggttttcaagtttgctggagcaaaaggatgacctgcatcctgaaaatacgagtggtgcatctcccgtttcagtattggagaatatagatgtggattgtccaacatcctctggtgaagcaaccaacagttctggtgataaattagagaaagatgaaactagtcaatgcaaaacatctttccttgaggagccagctaagggatgcccgattgatggtatcaacaaggctgacctaaaagatgaaatcgtgccatgcatatcatctcatcacgattgtgtggctaataggtgtcctggtagtgctgctgacattaccaatttggacagaccctcaactccttcgccaaaacgcaagcgtttcttctctgatgataatgagtttaatgtgtttgagtttgaggacttcggtgacgaagatgagacccctctgcttggaaaccttaaattcacatcaaaagctaagaaggctaaggttgaatcagcatctaaatcgacgaagggcccttgcatagataagaacgtaacacgattagtaaggagtatgccgtccactcggagaaaaggcattgtggactgcttgagccaactcaatgcagagcaggattctggaagctgtcctcggagtcaccctcttggcaaaaagaagctcggcatcccggttccaatcaaatggtag

SEQ ID NO: 88 - DNA, 1428 bp, Oryza sativa
atgcgcaccaagcacctgataccccaccacgccgccggctacacctacgcccgcgcgtacgccaccaccggcggcggcggcggggacgggggagatggaggtggaggtggcgacccgttcgagcagttccccgaggcggtgctcgggctgatcgtgtccaagctgcccttcaggtcggcggtcgccgcgtcggccatctcccgccggtggcgcggcgtcgcggcggccgcgccggcgctggacctcgacttcgccgcggcgttcccggccgcgccgcgccgcagggcggcattcgcggccgccgccacggccgcgctctcgaggccgcaccacccgctccgccgcctccgcctcggcctcgacggcctcttcgaccaggccttcgccgcctccgccgccgaccacctcgcctcctggctcgccgccgccgccgcgcgcggggtcgagcagttggagctgcacctcccccgctcccgcctcgccctcctcccgccttccctaatcgcctgcaccaacctcacatccttgacccttcgcctcgaccactacgcccaccctcttccgtccctctgctcgctcacccgcttgtcccgcctccacctcgcctccattccgcttgccggcgacgacttctttgcagacctcttctcgcactgcaaacagctccgctacctgatccttgaacaatgccgcattggtgcactctgcctagccggcacaacgcagctttgctcgcttgccatcacggattgttcttggactccgcagtcttctgttgccttctctgacatgccagcgttgcgcaccctccactacttgggtgcaatggcaaccagacacattatagacaatgtcgattcattagaagaggtcgttcttgccatcaagaagccgcaggtcaagctccaggagcctaatctcagagagcttctttctttggttgggaatgtacagagccttatgctttcaccttggtgcattgagcaatttgcacgtcctgaggagtggtccaaggtgcggctaaacaaagtgaggcagttgtcatgtataatagagaggagagaagaaggtgcttcatccattgccccattgctcgcaaattgtcagaatgtggaagaactctctgtgtctgttgtgccatcgcaatgcaagcggagatggggtagcgatgatggagcaaaccattgggttatgggaggtaaaggggtcgtgctgaggcatctcagggcagttaggatggtgtacatcgatgagagcaagagtggattggatcttgttaagcttctgctcaagaacacaccaatgttagagatgatgactattgtgccttcgatggatggccttgagcaggcaaagttcaggcgcagggtattgaagctcagaaaggcctcccgagatgctgacatccagttttctgctactggatga

SEQ ID NO: 89 - DNA, 777 bp, Oryza sativa
atgttggacccaagatcggaaatctaccccaccatagcgtatcgtcctatccagccttccgatctcgaggttcttgagaatattcacctcgcgctgtttcccataagatacgagagagagttcttcttgaacgtggtcaacggcaatggtattatttcttggggtgctgtggataccagcagatcagatgaccgcagagatgagctgataggctttgtaaccacgagaataattgcagcacaagatagcgagattgaggacttgtttaggtataacagctcacgcaaagatctgacacttctgtatatcctgacgctcggtgtagtggagagctacagaaacctcggcataggttgttacctgctcgtccaacttagttttacagtttgtgattatgatctgattaatcctcacaagcattcgcgcttgcagcatcctcactggtccgagaggggtgtctatttgcatgtcatctcatataaccaacctgctatcagcttttacaataagatgctatttaagcttgtcagacgacttccacatttctattacataagagggcagcattatgattcatacttgtttgtgtactatgtcaatgggggccgttcgccttgctcaccactggctttcctgaagatggtggttgccaggttctggaacaaagaggagagaagtacacccagatggtccaggtgcaaggaatcgaccactctcttggtatctcagaataacaagaggatcattggtggtgatgatacgagatgtcatgtctaa

SEQ ID NO: 90 - DNA, 987 bp, Oryza sativa
atgcagagttacagtgagaagagatctcataagatatttttggaaagccttctcgtgtgtggaatttgtctaagtgaggatgttggcagaaatttcatcaagctcccatgccatcattccttttgtttgaagtgtatggagtctcactgcaaaatccatgtgaaagaagggaatttaatgcagctggcatgtcctgatacaaattgccgcaatccacttccgccatccgtattgaaaagccttctacgagatgatggatatgcacaatgggaatcatttgctctacagaaactgttagatgcaatgcctgatctagtttactgccccaggtgttctgctgcttgcttggaagttgacaatgatgctcaatgcccgggttgtttttttaccttctgcactttgtgcaaacgccgccgccatgtgggggatacatgtattactcctgaagaaaaaatacgcattttgaaggaacgacagaaattgtattccataccagaggaacaattgttgaaagaaaagagggaaatagacgagttgataaatatccaggaagcacttcgtgattctaagcaatgccctcgttgtaagatggctatctcaaaaattgaaggttgcaacaagatgacatgtgggaactgtgggagattcttctgctatcgttgtaacaaagcaattggaggatatgatcatttctggaatggaaactgtgatatgtttgagagggaacaagatgaaaacccacagcagcaggatgatgaaaattttggtggcgaccctgacgaagatgctgaactcttagaacctgaatgggtgctgttaacttatccctgtccaaactgtggccgtcggaatgaaaagctcggtaccaacaatcatatactttgcatcggatgccgaggccattattgtgcgttgtgtcggaaaagagttttgaggggcgagcaacactttggacctagaggctgccagcaacacactgaagattga

SEQ ID NO: 91 - DNA, 852 bp, Oryza sativa
atggagtctcactgcaaaatccatgtgaaagaagggaatttaatgcagctggcatgtcctgatacaaattgccgcaatccacttccgccatccgtattgaaaagccttctacgagatgatggatatgcacaatgggaatcatttgctctacagaaactgttagatgcaatgcctgatctagtttactgccccaggtgttctgctgcttgcttggaagttgacaatgatgctcaatgcccgggttgtttttttaccttctgcactttgtgcaaacgccgccgccatgtgggggatacatgtattactcctgaagaaaaaatacgcattttgaaggaacgacagaaattgtattccataccagaggaacaattgttgaaagaaaagagggaaatagacgagttgataaatatccaggaagcacttcgtgattctaagcaatgccctcgttgtaagatggctatctcaaaaattgaaggttgcaacaagatgacatgtgggaactgtgggagattcttctgctatcgttgtaacaaagcaattggaggatatgatcatttctggaatggaaactgtgatatgtttgagagggaacaagatgaaaacccacagcagcaggatgatgaaaattttggtggcgaccctgacgaagatgctgaactcttagaacctgaatgggtgctgttaacttatccctgtccaaactgtggccgtcggaatgaaaagctcggtaccaacaatcatatactttgcatcggatgccgaggccattattgtgcgttgtgtcggaaaagagttttgaggggcgagcaacactttggacctagaggctgccagcaacacactgaagattga

SEQ ID NO: 92 - DNA, 348 bp, Oryza sativa
atggagtctcactgcaaaatccatgtgaaagaagggaatttaatgcagctggcatgtcctgatacaaattgccgcaatccacttccgccatccgtattgaaaagccttctacgagatgatggatatgcacaatgggaatcatttgctctacagaaactgttagatgcaatgcctgatctagtttactgccccaggtgttctgctgcttgcttggaagttgacaatgatgctcaatgcccgggttgtttttttaccttctgcactttgtgcaaacgccgccgccatgtgggggatacatgtattactcctgaagaaaaaatacgcattttgaaggtaacaatagcataa

SEQ ID NO: 93 - DNA, 441 bp, Oryza sativa
atgctccacctctcgtccccggccaccccagcatccaactcagtagcgggggtggggatatacttcgataaggacaccgacggggagaccctagcctttcgtgtccgcccctggctccacgactgccgcgtcgagcacctccgccacctcgacctctctaggaacagcctcaacagcatcttgccggcgaagctgctcaacgcgaccgagctccgggtgctctcacttgccgacaatgacatctctagcgtgctccccaatggcggctccgtctcgtacttgctcagcctccaggagctcaacctgtcgaacaacgcgctcgccgggcgcctcccgcccgctctctacaggctgccgagcctcgccgtgcttggtctcaccaacaactacctcatcggcgatctcgctgccttggagggcgtcgacttgagcgccaactaa

SEQ ID NO: 94 - DNA, 1023 bp, Oryza sativa
atggggaggggacgagcgccgtgctgcgccaaggtggggctgaacaggggttcgtggacgccgcaggaggacatgcggctcatcgcctacatccagaagcacggccacgccaactggcgagccctccccaagcaggccggattgctgcggtgcggcaagagctgccgcctccggtggatcaactacctgcgccccgacctgaagcgcggcaacttcaccgccgacgaggaggacaccatcatcaagctgcacggcctactcgggaacaagtggtccaagatcgcgtcgtgcctgcccgggaggacggacaacgagatcaagaacgtgtggaacacccacctgaagaagagggtgtcgcagagagagaagccaggtgacaccaagaagaagggcaaggccgcggacgccagcgacgacgccgacgcgcattccccgtcgtcgtcggcgtcctcctcgacgacgacggcggccaataacaacaacagcggcgacacggccggcgagcagtgcggcacgagcaaggagcccgagaacgtcgacgtgtccttcttcgagcaagacatcgacatctcggacatgctggtggacgcgcccacggaggcgccgctggtcgcggcgccaatgccgccgtccccgtgctcgtcgtcctccctgacgacgacgacgtgcgtcggcgccgtgtcggacgagctgctcgacctgccggagatcgacatcgagccggatatatggagcatcatcgacggctacggcggcgatgagcccggcgacggcgatgcaacagtgccatgtaccgccagcccgggagaggagggagcagagtggtgggtagagaatttggagaaggagctcggcctgtgggggcccatggacgagtccctggcccatccggacccacccggacaggtttgttacccgggcccactcacggaaacagagggggacccagtctccacctacttccagtccgggcccaccgcctctccgctccaggagatcgcatcacccgccgttctctcatga

SEQ ID NO: 95 - DNA, 1056 bp, Oryza sativa
atggcgttggaggccaggttctttttggcggccgtgttcgccgtcgccgcgacgtgcttgtgcttatcggcggtggcctctgctttcgccgtgccgagcgtcgccttcgacgaagggtactcgccgctgttcggcgacgacaacctcgtccgctcgtcggatgataagagcgtccgcctcttgctcgaccggcgctccggttctgggttcatctcctcggattactacctccacggcttcttcagcgcgtccatcaagttgcccaaggcttacacggccggcgtcgtcgttgccttctacctgtcaaacggggacgtgtacgagaagacgcacgacgagctggacttcgagttcctgggcagccgttggggcggccagtggcgtgtgcagaccaacgcctacggcaacggcagcaccgcgcgcggccgcgaggagcgctacctcctccccttcgaccccaccctcgaggcccatcgctactccgtcctctgggcccccacccacatcatattctacatcgatgacacaccgatcagggaggtgatcaggcacccgggcatgggcggggatttcccgtcgaagccgatggcggtatacgcgacgatctgggacggttcgacctgggccacggacggcggcaagtacaaggtgaactacaagtacgcgccgttcgcctccgagttctccgacctggcgctgctcggctgccgcgccgacccggtgctccgcgccccgcgcgacggcggcggcgccgggtgcgccgagcccgacctgctcggcctcctcacggccgactacgccgtcatgaccccgcggaagcgcgccgcgatgcgcgcgttccgcgcgcggcacatgacctacaccgtgtgctacgacgcggtgcggtacgcggccgggccgttcccggagtgcgacgtctctgacgtggagaaggagtccttctcggcgtggggcgagtccaagaacgtcgtcatgaaggcgcgtggccgcgggcgccgccgaggacgcaaggccggcgccggagccatgtcgcgcctcgacgtgtccagcagctga

SEQ ID NO: 96 - DNA, 837 bp, Oryza sativa
atgcaggtgtttgttccaactaacacattatggctttcgatcgatcctaacggttttgttcgtgtacgtcgtcatttgcagctgtcaaacggggacgtgtacgagaagacgcacgacgagctggacttcgagttcctgggcagccgttggggcggccagtggcgtgtgcagaccaacgcctacggcaacggcagcaccgcgcgcggccgcgaggagcgctacctcctccccttcgaccccaccctcgaggcccatcgctactccgtcctctgggcccccacccacatcatattctacatcgatgacacaccgatcagggaggtgatcaggcacccgggcatgggcggggatttcccgtcgaagccgatggcggtatacgcgacgatctgggacggttcgacctgggccacggacggcggcaagtacaaggtgaactacaagtacgcgccgttcgcctccgagttctccgacctggcgctgctcggctgccgcgccgacccggtgctccgcgccccgcgcgacggcggcggcgccgggtgcgccgagcccgacctgctcggcctcctcacggccgactacgccgtcatgaccccgcggaagcgcgccgcgatgcgcgcgttccgcgcgcggcacatgacctacaccgtgtgctacgacgcggtgcggtacgcggccgggccgttcccggagtgcgacgtctctgacgtggagaaggagtccttctcggcgtggggcgagtccaagaacgtcgtcatgaaggcgcgtggccgcgggcgccgccgaggacgcaaggccggcgccggagccatgtcgcgcctcgacgtgtccagcagctga

SEQ ID NO: 97 - DNA, 945 bp, Oryza sativa
atggagctgttcccggcacaccctgacctgcagctccagatcagccctcctcctgccaccaagtcaatggacttagggttttggaaacgagctcttgaaacctccacgaccaccaccacggcggcggcggcggcaagtacaggtccttccgtcgctacttcctcctcgccgccggtagcgagtggcggggttggcggcggtgccggcggcttctaccagcaggcggccgtcgcgcctgcagctaacggccacggccatggccatggccatcaccaccaccaccaccaacatcaccagctcggcggcgcactccagttcttgcaccgcacccagcccatcccgccgcaggacgcggccgccggcggcggcctgcaggacctggcgttcgcgcggcccatccggggaatccccgtgtacaacacctcgcggccgctgcccttcctccagagccaccacctccagcaccaccagcattgctacgccgacacgatcggcgtcgcgccgggggccgggccgaggtcccccagcaagcaggcggcggcgctgcggctcgccgcggcgcccgccaagcgtggcgcccgcgcgccgcggatgcggtggacgacgtcgctgcacgcgcggttcgtccatgccgtcgagcttctcggaggccacgagagagctacacccaagtcagttcttgagctaatggacgtgaaggacctgaccttagctcatgtcaagtctcacttgcagatgtaccggaccatcaagaccactgaccacaaacaacctgctccaccatatgggcaaactaagactatcatagagatcccagacgacaatctgtttgacatcaacaacactagtgggtcagagtcttctgttcagcaacaatccaattttgacggcaatgaacaaggatccagcatgtgtgctctacggagcaacaactcctcaaggtga

SEQ ID NO: 98 - protein, 122 aa, Oryza sativa
MARIPRFLFATIPDGLPKSDADATMTTCLPYFRKLLADLNNRAAGDDDDDAVPPVTCVVADHLLGFSLDATVAVLASRCRPLPTLACRLPPPRPRLASRLRPPPARRRRSRYRPCAPREREE

SEQ ID NO: 99 - protein, 291 aa, Oryza sativa
MVSANQPPPDAAAAAAGSAGEDASKKVRKPYTITKSRESWTEQEHDKFLEALQLFDRDWKKIEAFVGSKTVIQIRSHAQKYFLKVQKNGTSEHVPPPRPKRKAAHPYPQKASKNEPGYTIKADSSSMLRNSGMNATVSSWTHNSIPPIVASSMVKEDLGAGAMAPNNFCSSSTEGPARAWQPGETNDQINQVPSLRLMPDFAQVYSFLGSVFDPSTSGHLQKLKEMNPIDVETALLLMRNLSINLTSPDFEDQKKLLSSYSTPSDGLELGSTRSSVLADRPLSAPFMIKGE

SEQ ID NO: 100 - protein, 516 aa, Oryza sativa
MKAAAATGGGGKETLAATLLRYLIILIVPFTVLYILYTLHAILSSTPSCPLDRPIVTSSVSLSQLSTTRNHTPSSSSLSTPPPAPVSMAATTLQHVVFGIAASARLWEKRKDYIKIWWRPNAGMRGFVWMDQPVRESGVPDGLPPIKISSNTSGFPYKNRRGHRSAIRISRIVSETFRLGLSGVRWYVMGDDDTVFLPDNLVAVLQKLDHRQPYYIGYPSESHLQNIFFSYGMAFGGGGFAISQPLAARLERMQDACIHRYPSLYGSDDRIHACMAELGVPLTRHPGFHQYDVYGDLLGLLAAHPVAPLVSLHHLDVVRPLFPNARSRPAALRRLFEGPVALDSAGAVQQSICYDARNRWTVSVSWGFVVMASRGMISAREMELPARTFLNWYKRADYKAHAFNTRPLARRPCEKPSFYYLSSARRTVARDGETTVTTYQRWRHRNDMRPPCRWKIADPDALLDTVVVLKKPDPGLWDRSPMRNCCRVLSSPKGQEGNKTMTIDVGVCKDWEFSQV

SEQ ID NO: 101 - protein, 511 aa, Oryza sativa
MKAAAATGGGGKETLAATLLRYLIILIVPFTVLYILYTLHAILSSTPSCPLDRPIVTSSVSLSQLSTTRNHTPSSSSLSTPPPAPVSMAATTLQHVVFGIAASARLWEKRKDYIKIWWRPNAGMRGFVWMDQPVRESGVPDGLPPIKISSNTSGFPYKNRRGHRSAIRISRIVSETFRLGLSGVRWYVMGDDDTVFLPDNLVAVLQKLDHRQPYYIGYPSESHLQNIFFSYGMAFGGGGFAISQPLAARLERMQDACIHRYPSLYGSDDRIHACMAELGVPLTRHPGFHQYDVYGDLLGLLAAHPVAPLVSLHHLDVVRPLFPNARSRPAALRRLFEGPVALDSAGAVQQSICYDARNRWTVSVSWGFVVMASRGMISAREMELPARTFLNWYKRADYKAHAFNTRPLARRPCEKPSFYYLSSARRTVARDGETTVTTYQRWRHRNDMRPPCRWKIADPDALLDTVVVLKKPDPGLWDRGAVVSQRTGRKQDDDHRRGCMQGLGIQPSIIH

SEQ ID NO: 102 - protein, 212 aa, Oryza sativa
MGFPVGYSELLLPRLLLQVLLLLGHLHRFLLWAFHAVGLGDLIDNPPGLAATEQDLMLQGRGGGMAEGWASSSALQHRRPEFRAIPPMAIEEALPVVRFDELVASAPAAVCGGGDCAVCLSGICGRDEVRRLSNCRHVFHRGCLDRWMAHEQRTCPLCRAPLIPDELLPAASGLPDPSDYDLSYYPSPLPLAPTPTLLRPHELLLNGLGGFQ

SEQ ID NO: 103 - protein, 362 aa, Oryza sativa
MLLLGCLWRRLKARGRRAEAVASGDGGEGGRFTKAASGGGGGGGGRFLVSDISEWLDKYKVFKVEELESGTGGFDDEHLIQGSVYKAYIDGEVFAVKKMKWDACEELKILQKVNHSNLVKLEGFCINSETGDCYLVYEYVENGSLDLWLMDRDRARRLDWRARLHIALDLAHGLQYIHEHTWPRVVHKDIKSSNVLLDDRMRAKIANFGLAKTGHNAVTTHIVGTQGYIAPEYLADGLVTTKMDVFAYGVVLLELVSGREAVSDDSGEPLWADADERLFRGREERLEARVAAWMDPALAEQTCPPGSVASVVSVAKACLHRDPAKRPSMVDVAYTLSKADESFGDYSGESVSVASSGGIAAR

SEQ ID NO: 104 - protein, 250 aa, Oryza sativa
MGRGRVELKRIENKINRQVTFSKRRNGLLKKAYELSVLCDAEVALIIFSSRGKLYEFGSAGITKTLERYQHCCYNAQDSNNALSETQSWYHEMSKLKAKFEALQRTQRHLLGEDLGPLSVKELQQLEKQLECALSQARQRKTQLMMEQVEELRRKERQLGEINRQLKHKLEVEGSTSNYRAMQQASWAQGAVVENGAAYVQPPPHSAAMDSEPTLQIGYPHQFVPAEANTIQRSTAPAGAENNFMLGWVL

SEQ ID NO: 105 - protein, 355 aa, Oryza sativa
MEQPKPPSVAASAAEAQNPNAFTCELPHSIYALAFSPSAPVLAAGSFLEDLHNRVSLLSFDPVHPTAASFRALPALSFDHPYPPTKLQFHPRAASAPHLLASSSDALRLWLAPLDDLAATATAAAPELRSVLDNRKTSASEFCAPLTSFDWNEAEPRRIGTASIDTTCTIWDIERGVVETQLIAHDKAVHDIAWGENGIFASVSADGSVRVFDLRDKEHSTIFYESPRPDTPLLRLAWNRYDFHYMATLLMDSSAVVVLDMRAPGVPVAELHRHRACANAVAWAPQATRHLCSAGDDGQALIWELPATPGAVPAEGIDPVMVYDAGAEINQLQWAAAYPEWISIAFENKVQLLRV

SEQ ID NO: 106 - protein, 355 aa, Oryza sativa; identical to SEQ ID NO: 105

SEQ ID NO: 107 - protein, 189 aa, Oryza sativa
MARMLLEAAASGSVEDSLNSDLVVILAGLLCALICVLGLGLVARCACTRRWARAAGGGTAAGGGGGGAAAANKGVKKEVLRSLPTVTYVSDGGGGEAEECAICLVEFEDGQAVRVLPQCDHRFHAACIDTWLRAHSSCPSCRRVLVAAEMPPGERCGRCGARSGGRGIGALLLNYWKAPACDAEGPELA

SEQ ID NO: 108 - protein, 167 aa, Oryza sativa
MLQRSTRQRAPGHGRTSSLCRIDATDMGCKLPSNSLAYHPARAVLLILACLLSRCPLIFRRGTHSVVHCNNVTLKYSYMNSEYCKLRLIDLSRGVRIIREGSDYYLIYQGEIQRYLGSRQHVSCDSKDAPAQSSEDEQRQISDRILFFLGDLEAACADAKRVKVRRP

SEQ ID NO: 109 - protein, 154 aa, Oryza sativa
MDGLPAELCIKIFHLLDHQSLASAPQVCRKWNTLTSDDELWRRLFKDRWGADAAAFYAPEGSRSWKDVFIVQDRCDRYGLGVRIIREGSDYYLIYQGEIQRYLGSRQHVSCDSKDAPAQSSEDEQRQISDRILFFLGDLEAACADAKRVKVRRP

SEQ ID NO: 110 - protein, 480 aa, Oryza sativa
MALKLLWLHADGHCQCHLSLLLRLVACLALVLLLPPPPPAQAATVVTHLPGFDGPLPFYLETGYVGVEEETGTELFYYFVESERSPRSDVVLLWLSGGPRCSVFSGFVYEIGPVMFVAERYSGGTVPRLEYNPYSWTKLASILFVDSPVGSGFSYAHDPKGYDVGDISSSMQIVKFLRKWLDDHPKYLSNPFYIGGDSYAGKVVPLITQYLSEGIEEMRHPIINLKGYLVGNPSAGDKIDVNSRVPYSHSFGVISDQLYEAALANCKGDYENPTNKPCTDVMQTINNLMSEVLEPACPFDWPWPMPGRDASNRKSLTEEHYWLGDPPVEPPFSCFAAYRYYLSYFWANDNATRAALGIKEGTVTEWIRCPTGLPYTRDLPSSIECHFNVTTRGYRALVYSGDHDPIVPFSGTQAWIRSLNFSIVDDWRAWHLDGQAAGFTIKYANNLTFATIKGGCHIPPENRPKESFIMAKRWLAGGPL

SEQ ID NO: 111 - protein, 448 aa, Oryza sativa
MALKLLWLHADGHCQCHLSLLLRLVACLALVLLLPPPPPAQAATVVTHLPGFDGPLPFYLETGYVGVEEETGTELFYYFVESERSPRSDVVLLWLSGGPRCSVFSGFVYEIGPVMFVAERYSGGTVPRLEYNPYSWTKLASILFVDSPVGSGFSYAHDPKGYDVGDISSSMQIVKFLRKWLDDHPKYLSNPFYIGGDSYAGKVVPLITQYLSEGIEEMRHPIINLKGYLVGNPSAGDKIDVNSRVPYSHSFGVISDQLYEAALANCKGDYENPTNKPCTDVMQTINNLMSEVLEPACPFDWPWPMPGRDASNRKSLTEEHYWLGDPPVEPPFSCFAAYRYYLSYFWANDNATRAALGIKEGTVTEWIRCPTGLPYTRDLPSSIECHFNVTTRGYRALVYSGDHDPIVPFSGTQAWIRSLNFSIVDDWRAWHLDGQAAGLNSQSSMLTT

SEQ ID NO: 112 - protein, 402 aa, Oryza sativa
MALKLLWLHADGHCQCHLSLLLRLVACLALVLLLPPPPPAQAATVVTHLPGFDGPLPFYLETGYVGVEEETGTELFYYFVESERSPRSDVVLLWLSGGPRCSVFSGFVYEIGPVMFVAERYSGGTVPRLEYNPYSWTKLASILFVDSPVGSGFSYAHDPKGYDVGDISSSMQIVKFLRKWLDDHPKYLSNPFYIGGDSYAGKVVPLITQYLSEGIEEMRHPIINLKGYLVGNPSAGDKIDVNSRVPYSHSFGVISDQLYEAALANCKGDYENPTNKPCTDVMQTINNLMSEVLEPACPFDWPWPMPGRDASNRKSLTEEHYWLGDPPVEPPFSCFAAYRYYLSYFWANDNATRAALGIKEGTVTEWIRCPTGLPYTRDLPSSIECHFNVTTRGYRALVYRFN

SEQ ID NO: 113 - protein, 402 aa, Oryza sativa; identical to SEQ ID NO: 112

SEQ ID NO: 114 - protein, 384 aa, Oryza sativa
MALKLLWLHADGHCQCHLSLLLRLVACLALVLLLPPPPPAQAATVVTHLPGFDGPLPFYLETGYVGVEEETGTELFYYFVESERSPRSDVVLLWLSGGPRCSVFSGFVYEIGPVMFVAERYSGGTVPRLEYNPYSWTKLASILFVDSPVGSGFSYAHDPKGYDVGDISSSMQIVKFLRKWLDDHPKYLSNPFYIGGDSYAGKVVPLITQYLSEGIEEMRHPIINLKGYLVGNPSAGDKIDVNSRVPYSHSFGVISDQLYEAALANCKGDYENPTNKPCTDVMQTINNLMSEVLEPACPFDWPWPMPGRDASNRKSLTEEHYWLGDPPVEPPFSCFAAYRYYLSYFWANDNATRAALGIKERRPRPYCAILRHAGMDKIIKLFHC

SEQ ID NO: 115 - protein, 366 aa, Oryza sativa
MALKLLWLHADGHCQCHLSLLLRLVACLALVLLLPPPPPAQAATVVTHLPGFDGPLPFYLETGYVGVEEETGTELFYYFVESERSPRSDVVLLWLSGGPRCSVFSGFVYEIGPVMFVAERYSGGTVPRLEYNPYSWTKLASILFVDSPVGSGFSYAHDPKGYDVGDISSSMQIVKFLRKWLDDHPKYLSNPFYIGGDSYAGKVVPLITQYLSEGIEEMRHPIINLKGYLVGNPSAGDKIDVNSRVPYSHSFGVISDQLYEAALANCKGDYENPTNKPCTDVMQTINNLMSEVLEPACPFDWPWPMPGRDASNRKSLTEEHYWLGDPPVEPPFSCFAAYRYYLSYFWANDNATRAALGIKEIHNQVC

SEQ ID NO: 116 - protein, 518 aa, Oryza sativa
MAAAAATSPARAAAWTFAAATCVKLLLVPTYRSTDFDVHRYWLALTHALPARRWYTDASSQWTLDYPPFFAYFSRLLALPAPLVDASLVSLPVPDAPPSFAYLLYLRLTVAFSDLLLLLSSVLLLATDALTRRRRRPFLSLALVLWSPALLAVDHVHFQYNGFLMGLLLLSLHFLEQGRDLAGGVVFAALLCSKHLFLVAAPVYFVYLFRHYCCGRGVVRGLGRLVLMGAGVAAVFAAAFVPFLYYGQMQQLFNRLFPFGRGLCHAYWAPNFWVFYILLDKIFAFLLRRLGFNIQIPEASFTGGLVGNSSPFAVLPKVTPITTFLLVILAMSPCLMKAFSKPQPRHIIRWVSYATTCGFMFGWHVHEKASLHFTIPLALIAMDSLEDAKHYFVLSIVSCYSLFPLLFENQEYPIKVMLLLTYATLMWVGFSSHFAAKSPQEGKKVNESGSVVRKNSFIGWISFSYLLGIVAIELWSQVFHHYVFGSRFPFLPLIMVSLYCGVGMMYSWMWQLAWIVRH

SEQ ID NO: 117 - protein, 373 aa, Oryza sativa
MASLPPPAPPAIGGDPLAATIPPSLPSPAPSSSSLNLSPSLLIITALLAFVFFASVSIHFLLRCLARPSHPAPSPLPRASAAAQRATTASAVEAGEATAASAVGRSHEGEAAAGGGEEVDDEKERLIASLPLFTMASALAALPKSSPDCAVCLSPFAPEAELRLLPACRHAFHASCVDAWLRTTPSCPLCRATVSLPHPPLPTAAAAAASNAAQQDPLDSRSSNNSRSFRVEIGSISNRRSSAAADDRRTYSLGSFDYRVDEEVEAVVSRIARPAAAKSTTGSVTPAPGEALAEAAGSRGWLREYVDRLASSASSLSGRWSGRWSARWSQSHHSNRQEDSWRWDPEAAVMSAPRGVDDDEPGFVTLYRWIVGV

SEQ ID NO: 118 - protein, 453 aa, Oryza sativa
MAIRNFWSMAAAAVGFRLVLVLFGGDLHLASRPEVSTPLTSIRRLAEGYWLKQASMSPYSGSMYHGSPLLLLVLGPLTNKRSVGHHDHIYCSLIFVAVDFIAAMLIRATGRRLQIARNRNLKSLELTEAVSNSVNVSAGDIASLIYLWNPWAIVTCVGSCTSPIENLMVVIMIYGACSRLAPLAAFGYVMATHLSLYPAILIVPIILLLGYGPDAPPTKVFRIKSSSASKTDVSDNDKSSSSRDVQQFLWKPVFHFILWMLFWTFYVLLLSSIVLNKVGGLQEMFEKTYGFILTVKDLSPNIGVLWYFFAEVFDFFRSFFLIVFNMNIVFMVLPLAIRLKHRPCFLAFIYTAIVAILKSYPSVGDSALYLGLLGLFANELAEMQFTFFLFFGYIGVSLLSPVMHNLWIWRGTGNANFYFATGLAYTCLQTVLVVESVSSMIKHDRKLRLLVTA

SEQ ID NO: 119 - protein, 420 aa, Oryza sativa
MAIRNFWSMAAAAVGFRLVLVLFGGDLHLASRPEVSTPLTSIRRLAEGYWLKQASMSPYSGSMYHGSPLLLLVLGPLTNKRSVGHHDHIYCSLIFVAVDFIAAMLIRATGRRLQIARNRNLKSLELTEAVSNSVNVSAGDIASLIYLWNPWAIVTCVGSCTSPIENLMVVIMIYGACSRLAPLAAFGYVMATHLSLYPAILIVPIILLLGYGPDAPPTKVFRIKSSSASKTDVSDNDKSSSSRDVQQFLWKPVFHFILWMLFWTFYVLLLSSIVLNKVGGLQEMFEKTYGFILTVKDLSPNIGVLWYFFAEVFDFFRSFFLIVFNMNIVFMVLPLAIRLKHRPCFLAFIYTAIVAILKSYPSVGDSALYLGLLGLFANELAEMQFTFFLFFGYIGVSLLSPVMHNLWIWRVSPSPILPLS

SEQ ID NO: 120 - protein, 187 aa, Oryza sativa
MRRLLVPVLLLMLGLSTCESSVLQDTCKSVAAGHKYVTYNDCIKAFQADSASATAADARGLAAIAARIAEKAANATSARIAALRAAEKDARRKDRLGVCAEVYSDAVDQLGETAEDIARGGDEATQDAVTQLSAALDAPGTCEDAFGEADDASPLAPEDAEFAKLATIALAVAASLSPPPSTPATMD

SEQ ID NO: 121 - protein, 389 aa, Oryza sativa
MAAMASSPPTTPNLGSQPTWVPYEPTRDCSQGLCSMYCPQWCYFIFPPPPPAFDITGSSSDDSSGPTFSPLVIAIIGVLASAFLLVSYYTIISKYCGTFSSLRNRLLGSSAHRGSGGGADGGDNSRSQEPWSVALSDGMDETLINKITVCKYRRGDGFVDSTDCSVCLGEFREGESLRLLPKCSHAFHVPCIDTWLKSHSNCPLCRCNIAFVTVGMVSPEPEARVPREDRRDNHELVLTIDNPEHVREEPQNVVTGVAVGNGGRNHEAKDGPGRSEDANGTAEIREDGALMPPTRAPSSLSDTHREGRMSIADVLQASLEDELMVARESGLLAGSSGSSRRCHGEHSKDGGGRSGRALPDGANMKRLAPAGRSCFSSRSGRGKDSVLPM

SEQ ID NO: 122 - protein, 258 aa, Oryza sativa
MLDPRSEIYPTIAYRPIQPSDLEVLENIHLALFPIRYEREFFLNVVNGNGIISWGAVDTSRSDDRRDELIGFVTTRIIAAQDSEIEDLFRYNSSRKDLTLLYILTLGVVESYRNLGIGCYLLVQLSFTVCDYDLINPHKHSRLQHPHWSERGVYLHVISYNQPAISFYNKMLFKLVRRLPHFYYIRGQHYDSYLFVYYVNGGRSPCSPLAFLKMVVARFWNKEERSTPRWSRCKESTTLLVSQNNKRIIGGDDTRCHV

SEQ ID NO: 123 - protein, 328 aa, Oryza sativa
MQSYSEKRSHKIFLESLLVCGICLSEDVGRNFIKLPCHHSFCLKCMESHCKIHVKEGNLMQLACPDTNCRNPLPPSVLKSLLRDDGYAQWESFALQKLLDAMPDLVYCPRCSAACLEVDNDAQCPGCFFTFCTLCKRRRHVGDTCITPEEKIRILKERQKLYSIPEEQLLKEKREIDELINIQEALRDSKQCPRCKMAISKIEGCNKMTCGNCGRFFCYRCNKAIGGYDHFWNGNCDMFEREQDENPQQQDDENFGGDPDEDAELLEPEWVLLTYPCPNCGRRNEKLGTNNHILCIGCRGHYCALCRKRVLRGEQHFGPRGCQQHTED

SEQ ID NO: 124 - protein, 283 aa, Oryza sativa
MESHCKIHVKEGNLMQLACPDTNCRNPLPPSVLKSLLRDDGYAQWESFALQKLLDAMPDLVYCPRCSAACLEVDNDAQCPGCFFTFCTLCKRRRHVGDTCITPEEKIRILKERQKLYSIPEEQLLKEKREIDELINIQEALRDSKQCPRCKMAISKIEGCNKMTCGNCGRFFCYRCNKAIGGYDHFWNGNCDMFEREQDENPQQQDDENFGGDPDEDAELLEPEWVLLTYPCPNCGRRNEKLGTNNHILCIGCRGHYCALCRKRVLRGEQHFGPRGCQQHTED

SEQ ID NO: 125 - protein, 115 aa, Oryza sativa
MESHCKIHVKEGNLMQLACPDTNCRNPLPPSVLKSLLRDDGYAQWESFALQKLLDAMPDLVYCPRCSAACLEVDNDAQCPGCFFTFCTLCKRRRHVGDTCITPEEKIRILKVTIA

SEQ ID NO: 126 - protein, 146 aa, Oryza sativa
MLHLSSPATPASNSVAGVGIYFDKDTDGETLAFRVRPWLHDCRVEHLRHLDLSRNSLNSILPAKLLNATELRVLSLADNDISSVLPNGGSVSYLLSLQELNLSNNALAGRLPPALYRLPSLAVLGLTNNYLIGDLAALEGVDLSAN

SEQ ID NO: 127 - protein, 340 aa, Oryza sativa
MGRGRAPCCAKVGLNRGSWTPQEDMRLIAYIQKHGHANWRALPKQAGLLRCGKSCRLRWINYLRPDLKRGNFTADEEDTIIKLHGLLGNKWSKIASCLPGRTDNEIKNVWNTHLKKRVSQREKPGDTKKKGKAADASDDADAHSPSSSASSSTTTAANNNNSGDTAGEQCGTSKEPENVDVSFFEQDIDISDMLVDAPTEAPLVAAPMPPSPCSSSSLTTTTCVGAVSDELLDLPEIDIEPDIWSIIDGYGGDEPGDGDATVPCTASPGEEGAEWWVENLEKELGLWGPMDESLAHPDPPGQVCYPGPLTETEGDPVSTYFQSGPTASPLQEIASPAVLS

SEQ ID NO: 128 - protein, 351 aa, Oryza sativa
MALEARFFLAAVFAVAATCLCLSAVASAFAVPSVAFDEGYSPLFGDDNLVRSSDDKSVRLLLDRRSGSGFISSDYYLHGFFSASIKLPKAYTAGVVVAFYLSNGDVYEKTHDELDFEFLGSRWGGQWRVQTNAYGNGSTARGREERYLLPFDPTLEAHRYSVLWAPTHIIFYIDDTPIREVIRHPGMGGDFPSKPMAVYATIWDGSTWATDGGKYKVNYKYAPFASEFSDLALLGCRADPVLRAPRDGGGAGCAEPDLLGLLTADYAVMTPRKRAAMRAFRARHMTYTVCYDAVRYAAGPFPECDVSDVEKESFSAWGESKNVVMKARGRGRRRGRKAGAGAMSRLDVSSS

SEQ ID NO: 129 - protein, 278 aa, Oryza sativa
MQVFVPTNTLWLSIDPNGFVRVRRHLQLSNGDVYEKTHDELDFEFLGSRWGGQWRVQTNAYGNGSTARGREERYLLPFDPTLEAHRYSVLWAPTHIIFYIDDTPIREVIRHPGMGGDFPSKPMAVYATIWDGSTWATDGGKYKVNYKYAPFASEFSDLALLGCRADPVLRAPRDGGGAGCAEPDLLGLLTADYAVMTPRKRAAMRAFRARHMTYTVCYDAVRYAAGPFPECDVSDVEKESFSAWGESKNVVMKARGRGRRRGRKAGAGAMSRLDVSSS

SEQ ID NO: 130 - protein, 314 aa, Oryza sativa
MELFPAHPDLQLQISPPPATKSMDLGFWKRALETSTTTTTAAAAASTGPSVATSSSPPVASGGVGGGAGGFYQQAAVAPAANGHGHGHGHHHHHHQHHQLGGALQFLHRTQPIPPQDAAAGGGLQDLAFARPIRGIPVYNTSRPLPFLQSHHLQHHQHCYADTIGVAPGAGPRSPSKQAAALRLAAAPAKRGARAPRMRWTTSLHARFVHAVELLGGHERATPKSVLELMDVKDLTLAHVKSHLQMYRTIKTTDHKQPAPPYGQTKTIIEIPDDNLFDINNTSGSESSVQQQSNFDGNEQGSSMCALRSNNSSR

SEQ ID NO: 131 - DNA, 25 bp, Artificial Sequence
  Description of Artificial Sequence: Synthetic primer
ccccggatccatggagacgacggcg

SEQ ID NO: 132 - DNA, 28 bp, Artificial Sequence
  Description of Artificial Sequence: Synthetic primer
gcgcctcgagttagtcggaggcgtcgcc

SEQ ID NO: 133 - DNA, 23 bp, Artificial Sequence
  Description of Artificial Sequence: Synthetic primer
ggcctccaaaatttatagtccca

SEQ ID NO: 134 - DNA, 21 bp, Artificial Sequence
  Description of Artificial Sequence: Synthetic primer
gtggagaggcctcctgtttac

SEQ ID NO: 135 - DNA, 20 bp, Artificial Sequence
  Description of Artificial Sequence: Synthetic primer
gaggcttcctgttgactggt

SEQ ID NO: 136 - DNA, 20 bp, Artificial Sequence
  Description of Artificial Sequence: Synthetic primer
attgcctccgttggtgttga

SEQ ID NO: 137 - DNA, 20 bp, Artificial Sequence
  Description of Artificial Sequence: Synthetic primer
tctgtagccccgctattctt

SEQ ID NO: 138 - DNA, 20 bp, Artificial Sequence
  Description of Artificial Sequence: Synthetic primer
aggtagagcggtgaggtcac

SEQ ID NO: 139 - DNA, 22 bp, Artificial Sequence
  Description of Artificial Sequence: Synthetic primer
tacccgtgcaaacaaagaacag

SEQ ID NO: 140 - DNA, 20 bp, Artificial Sequence
  Description of Artificial Sequence: Synthetic primer
ggaaagtcttttggacacgc

SEQ ID NO: 141 - DNA, 12 bp, Artificial Sequence
  Description of Artificial Sequence: Synthetic oligonucleotide
atgatgatgatg

SEQ ID NO: 142 - DNA, 12 bp, Artificial Sequence
  Description of Artificial Sequence: Synthetic oligonucleotide
gagagagagaga

SEQ ID NO: 143 - DNA, 20 bp, Artificial Sequence
  Description of Artificial Sequence: Synthetic primer
tttgccagctttgaccttca

SEQ ID NO: 144 - DNA, 20 bp, Artificial Sequence
  Description of Artificial Sequence: Synthetic primer
ccatcgaccgttgcacatta

SEQ ID NO: 145 - DNA, 19 bp, Artificial Sequence
  Description of Artificial Sequence: Synthetic primer
acctcccgttgcttctctc

SEQ ID NO: 146 - DNA, 20 bp, Artificial Sequence
  Description of Artificial Sequence: Synthetic primer
tcggagagaatttcgggctc

SEQ ID NO: 147 - DNA, 18 bp, Artificial Sequence
  Description of Artificial Sequence: Synthetic primer
ccacatcggttatgacca

SEQ ID NO: 148 - DNA, 20 bp, Artificial Sequence
  Description of Artificial Sequence: Synthetic primer
cgtctccatcgatacacctc

SEQ ID NO: 149 - DNA, 20 bp, Artificial Sequence
  Description of Artificial Sequence: Synthetic primer
caccatctgtccaaagtcca

SEQ ID NO: 150 - DNA, 20 bp, Artificial Sequence
  Description of Artificial Sequence: Synthetic primer
gtaactctgctccggcaact

SEQ ID NO: 151 - DNA, 22 bp, Artificial Sequence
  Description of Artificial Sequence: Synthetic primer
tcgtttattctattgtttgcca

SEQ ID NO: 152 - DNA, 21 bp, Artificial Sequence
  Description of Artificial Sequence: Synthetic primer
ccatctccttggcgtgtacaa

SEQ ID NO: 153 - DNA, 21 bp, Artificial Sequence
  Description of Artificial Sequence: Synthetic primer
gtgctgtccatatatcctcgc

SEQ ID NO: 154 - DNA, 20 bp, Artificial Sequence
  Description of Artificial Sequence: Synthetic primer
caacctggaccatagccgct

SEQ ID NO: 155 - DNA, 22 bp, Artificial Sequence
  Description of Artificial Sequence: Synthetic primer
ctaccggatctacaagagcaag

SEQ ID NO: 156 - DNA, 19 bp, Artificial Sequence
  Description of Artificial Sequence: Synthetic primer
gatcttcgtcgtgaacacc

SEQ ID NO: 157 - DNA, 18 bp, Artificial Sequence
  Description of Artificial Sequence: Synthetic primer
gcgccaaaatttcttggt

SEQ ID NO: 158 - DNA, 20 bp, Artificial Sequence
  Description of Artificial Sequence: Synthetic primer
cttctcggcggtgatcttga

SEQ ID NO: 159 - DNA, 20 bp, Artificial Sequence
  Description of Artificial Sequence: Synthetic primer
ctctctactcgccaaccacc

SEQ ID NO: 160 - DNA, 20 bp, Artificial Sequence
  Description of Artificial Sequence: Synthetic primer
catgaacagcctggtgtcgt

SEQ ID NO: 161 - DNA, 19 bp, Artificial Sequence
  Description of Artificial Sequence: Synthetic primer
ggcgtgaggcgtacatcac

SEQ ID NO: 162 - DNA, 22 bp, Artificial Sequence
  Description of Artificial Sequence: Synthetic primer
ggagtactgattggtagtgtcg

SEQ ID NO: 163 - DNA, 18 bp, Artificial Sequence
  Description of Artificial Sequence: Synthetic primer
gagtgagcaggagaggta

SEQ ID NO: 164 - DNA, 20 bp, Artificial Sequence
  Description of Artificial Sequence: Synthetic primer
catgacccagtccgtcttct

SEQ ID NO: 165 - DNA, 20 bp, Artificial Sequence
  Description of Artificial Sequence: Synthetic primer
tagtgcaaagccttccctgt

SEQ ID NO: 166 - DNA, 20 bp, Artificial Sequence
  Description of Artificial Sequence: Synthetic primer
cctgcggtagctttcgtaac

SEQ ID NO: 167 - DNA, 19 bp, Artificial Sequence
  Description of Artificial Sequence: Synthetic primer
gcgtcttcttcgactgcac

SEQ ID NO: 168 - DNA, 20 bp, Artificial Sequence
  Description of Artificial Sequence: Synthetic primer
gctgaaagcctctccatgtt

SEQ ID NO: 169 - DNA, 20 bp, Artificial Sequence
  Description of Artificial Sequence: Synthetic primer
gcatgatgcatagtggatgg

SEQ ID NO: 170 - DNA, 19 bp, Artificial Sequence
  Description of Artificial Sequence: Synthetic primer
tactcacccagccatggac

SEQ ID NO: 171 - DNA, 19 bp, Artificial Sequence
  Description of Artificial Sequence: Synthetic primer
cggcgaacgtctgcttgta

SEQ ID NO: 172 - DNA, 20 bp, Artificial Sequence
  Description of Artificial Sequence: Synthetic primer
tggcacatggtctcttatgc

SEQ ID NO: 173 - DNA, 20 bp, Artificial Sequence
  Description of Artificial Sequence: Synthetic primer
agaggagcgctgatctatgc

SEQ ID NO: 174 - DNA, 20 bp, Artificial Sequence
  Description of Artificial Sequence: Synthetic primer
gcctcactactggaagaagg

SEQ ID NO: 175 - DNA, 19 bp, Artificial Sequence
  Description of Artificial Sequence: Synthetic primer
tcccctctagctgatatgc

SEQ ID NO: 176 - DNA, 20 bp, Artificial Sequence
  Description of Artificial Sequence: Synthetic primer
cgtcatcgacaacccctcgc

SEQ ID NO: 177 - DNA, 20 bp, Artificial Sequence
  Description of Artificial Sequence: Synthetic primer
cagtagaacagcgacgtgtt

SEQ ID NO: 178 - DNA, 19 bp, Artificial Sequence
  Description of Artificial Sequence: Synthetic primer
ttgattttgccgaggtgta

SEQ ID NO: 179 - DNA, 34 bp, Artificial Sequence
  Description of Artificial Sequence: Synthetic primer
cctgctcactccaccctggaggaagcaggtcgga

SEQ ID NO: 180 - protein, 24 aa, Oryza sativa
KGSAAASTASPTADADDDDATTER

SEQ ID NO: 181 - protein, 4 aa, Unknown
  Description of Unknown: "DEAD" box family motif peptide
DEAD

SEQ ID NO: 182 - protein, 261 aa, Oryza sativa
METTAAKKLPPGFRFRPTDEELVVHYLRRRALGSPLPPAVDIPDVRLLAHDPSDLLPPGWSEQERYFFTCKEAKYVKGRRANRATGAGYWKATGKEKPVAVSVAAAPRSQAAAVVVGMKRSLVFYRGKPPTGKKTDWVMHEYRLAGAGLAPCRRAATADHPARPAEGWVLCRVFRKKGSAAASTASPTADADDDDATTERADDAAAGVRFIDFFARADARRRPRAASPVSSSCVTDASAEHCREQETTSRNGGAAAGDASD

SEQ ID NO: 183 - protein, 260 aa, Oryza sativa
METTAANKLPPGFRFRPTDEELVVHYLRRRALGSPLPPAVDIPDVRLLAHDPSDLLPPGWSEQERYFFTCKEAKYVKGRRANRATGAGYWKATGKEKPVAVSVAAAPRNQAAAVVVGMKRSLVFYRGKPPTGKKTDWVMHEYRLAGAGLAPCRRAATADHPARPAEGWVLCRVFRKKGSAAASTASPTADADDDDATTERADDAAAGVRFIDFFARADARRRRAASPVSSSCVTDASAEHCREQETTSRNGGAAAGDASD

SEQ ID NO: 184 - protein, 14 aa, Oryza sativa
LVFYRGKPPTGKKT

SEQ ID NO: 185 - protein, 14 aa, Oryza sativa
ETTAAKKLPPGFRF

SEQ ID NO: 186 - protein, 14 aa, Oryza sativa
KPPTGKKTDWVMHE

SEQ ID NO: 187 - protein, 14 aa, Oryza sativa
LCRVFRKKGSAAAS

SEQ ID NO: 188 - DNA, 20 bp, Artificial Sequence
  Description of Artificial Sequence: Synthetic primer
cccaagaagctattcgcaag

SEQ ID NO: 189 - DNA, 20 bp, Artificial Sequence
  Description of Artificial Sequence: Synthetic primer
atcaagccgtctcccaacta

SEQ ID NO: 190 - DNA, 20 bp, Artificial Sequence
  Description of Artificial Sequence: Synthetic primer
ctacagccccaccagatcat

SEQ ID NO: 191 - DNA, 20 bp, Artificial Sequence
  Description of Artificial Sequence: Synthetic primer
agggacactcagctcctcaa

SEQ ID NO: 192 - DNA, 20 bp, Artificial Sequence
  Description of Artificial Sequence: Synthetic primer
acctccagcaagattggaga

SEQ ID NO: 193 - DNA, 20 bp, Artificial Sequence
  Description of Artificial Sequence: Synthetic primer
gatgctaacgcgtgaagaga

SEQ ID NO: 194 - DNA, 20 bp, Artificial Sequence
  Description of Artificial Sequence: Synthetic primer
atctctgtgaagccgcagat

SEQ ID NO: 195 - DNA, 20 bp, Artificial Sequence
  Description of Artificial Sequence: Synthetic primer
caacagctgaaggggtgttt

SEQ ID NO: 196 - DNA, 20 bp, Artificial Sequence
  Description of Artificial Sequence: Synthetic primer
cagtttagcaggactgttgg

SEQ ID NO: 197 - DNA, 20 bp, Artificial Sequence
  Description of Artificial Sequence: Synthetic primer
tgtcatgcctcctctaccta

SEQ ID NO: 198 - protein, 672 aa, Oryza sativa
MADQNGAAAVSEAEAAPVQVETGAESGDAESEQYQPFFSMCQPIRSVSYSNSWDMSNLDSMDDKYMLSAPWPENEQPQSENDMDLLDGDTNMQSEPLSTEQPSSNACDPVICLMVHTISLELKYLIQLFYINCDNQDEIDIWDGKTKQDSSSLLDSKLCNSGSGAEPCNMEGQQFSLSFSRNTQSQLVMIKMVSVHSVLLKNILMNQSEDYPELSSDFRPGQQEDAHEFLRCLLDNLDKCTTDPKPKDKPSSFDEESIVKQVFGGRLKSKLTCCECGHCSETYEPFLDLSLEIDQADNLIDALESFTKLERIGDAEDKLNCEHCNAKVCKNKQLMLDRSPDVVAIHLKRFTSLDRSVEKIDKHVVYPLELDLKPFHCDPDINKELKYDLYGVVEHSGSPSYGHYVCSVRSSPSTWHLMNDSHVDLISEASALNQEGYILFYIRQGKFQWFSSLLEQKDDLHPENTSGASPVSVLENIDVDCPTSSGEATNSSGDKLEKDETSQCKTSFLEEPAKGCPIDGINKADLKDEIVPCISSHHDCVANRCPGSAADITNLDRPSTPSPKRKRFFSDDNEFNVFEFEDFGDEDETPLLGNLKFTSKAKKAKVESASKSTKGPCIDKNVTRLVRSMPSTRRKGIVDCLSQLNAEQDSGSCPRSHPLGKKKLGIPVPIKW

SEQ ID NO: 199 - protein, 475 aa, Oryza sativa
MRTKHLIPHHAAGYTYARAYATTGGGGGDGGDGGGGGDPFEQFPEAVLGLIVSKLPFRSAVAASAISRRWRGVAAAAPALDLDFAAAFPAAPRRRAAFAAAATAALSRPHHPLRRLRLGLDGLFDQAFAASAADHLASWLAAAAARGVEQLELHLPRSRLALLPPSLIACTNLTSLTLRLDHYAHPLPSLCSLTRLSRLHLASIPLAGDDFFADLFSHCKQLRYLILEQCRIGALCLAGTTQLCSLAITDCSWTPQSSVAFSDMPALRTLHYLGAMATRHIIDNVDSLEEVVLAIKKPQVKLQEPNLRELLSLVGNVQSLMLSPWCIEQFARPEEWSKVRLNKVRQLSCIIERREEGASSIAPLLANCQNVEELSVSVVPSQCKRRWGSDDGANHWVMGGKGVVLRHLRAVRMVYIDESKSGLDLVKLLLKNTPMLEMMTIVPSMDGLEQAKFRRRVLKLRKASRDADIQFSATG
